(19) United States
(12) Patent Application Publication
(10) Pub. No.: US 2018/0044399 A1
(43) Pub. Date: Feb. 15, 2018

(54) INHIBITORY CHIMERIC ANTIGEN RECEPTORS

(71) Applicants: RINAT NEUROSCIENCE CORP., South San Francisco, CA (US); CELLECTIS, Paris (FR)

(72) Inventors: Arvind RAJPAL, San Francisco, CA (US); Shobha Chowdary POTLURI, Foster City, CA (US); Laurent POIROT, Paris (FR); Alexandre JUILLERAT, New York, NY (US); Thomas Charles PERTEL, San Mateo, CA (US); Donna Marie STONE, Brisbane, CA (US); Barbra Johnson SASU, San Francisco, CA (US)

(73) Assignees: Rinat Neuroscience Corp., South San Francisco, CA (US); Cellectis, Paris (FR)

(21) Appl. No.: 15/525,906

(22) PCT Filed: Nov. 9, 2015
(86) PCT No.: PCT/IB2015/058650

§ 371 Date: May 10, 2017

Related U.S. Application Data
(60) Provisional application No. 62/081,960, filed on Nov. 19, 2014.
(60) Provisional application No. 62/078,927, filed on Nov. 12, 2014.

(51) Int. Cl. C07K 14/705; C07K 14/725; A61K 35/17; C07K 16/28; C12N 5/0783

(52) U.S. Cl. CPC C07K 14/70503; C07K 16/2803; C07K 14/70521; C07K 14/70517; C12N 5/0636; A61K 35/17; C07K 14/7051; C07K 14/70578; C12N 2510/00; C07K 2317/622; C07K 2319/03; C07K 2319/74; C07K 2317/76

(57) ABSTRACT

The invention relates to an inhibitory chimeric antigen receptor (N-CAR) comprising an extracellular domain comprising an antigen binding domain, a transmembrane domain, and, an intracellular domain wherein the intracellular domain comprises an Immunoreceptor Tyrosine-based Switch Motif ITSM, wherein said ITSM is a sequence of amino acid TX₁YX₂X₃X₄, wherein X₁ is an amino acid X₂ is an amino acid X₃ is an amino acid and X₄ is V or

### FIELD OF THE INVENTION

[0001] The invention relates to negative T-cell signal inducing chimeric antigen receptor (N-CAR or ICAR) and to T-cells comprising such N-CAR as well as a positive T-cell signal inducing CAR (P-CAR) as well as their use in therapy.

### BACKGROUND

[0002] T-cell therapies based on redirected T-cell targeting using chimeric antigen receptor (CAR) are beginning to show great promise in the clinic, particularly in the oncology setting (see Hutchinson L., Nat Rev Clin Oncol. 2014 Oct. 28; Lee D W et al., Lancet. 2014 Oct. 10. pii: S0140-6736(14)61403-3 or Grupp S A et al., N Engl J Med. 2013 Apr. 18; 368(16):1509-18). Given the growing enthusiasm of the field, there is a significant effort being made to identify appropriate targets for CAR T-cell therapy. Given the potency of such therapeutics, the field's ability to identify novel targets for such therapy is hindered by concerns about on-target off-tissue (meaning off-tumor) activity. Such events not only mitigate efficacy but also present tremendous safety challenges as demonstrated by recent clinical events (see Morgan R A et al., Mol Ther. 2010 April; 18(4):843-51; Morgan R A et al., J Immunother. 2013 Feb.; 36(2):133-51 or Linette G P et al., Blood. 2013 Aug. 8; 122(6):863-71). Clinical approaches to mitigate these safety concerns while effective also act directly or indirectly on the infused CAR T-cell therapeutic entities.

[0003] In order to address these safety issues pertaining to on-target off-tissue activity of CAR T-cells, and expand the target space amenable to this mode of therapeutics, there is growing emphasis in creating logic gates to modulate T-cell signaling (see Federov V D et al., Sci Transl Med. 2013 Dec. 11; 5(215):215ra172).

[0004] One such approach involves using a NOT gate, wherein the T-cell expresses two or more CARs on its cell surface. CARs that provide positive T-cell signals (P-CARs) bind to tumor antigens to enable T-cell activation and/or proliferation and/or cytokine secretion, and/or cytotoxicity mediated by CD3zeta or other immunoreceptor tyrosine-based activation motif (ITAM) containing motifs; while CARs that provide a negative T-cell signal (N-CARs) bind to the off-tissue antigens and attenuate or abrogate the positive signals.

[0005] Therefore under the on-tissue (on-tumor) scenario the T-cell only receives the P-CAR signal and subsequent activation and cytotoxicity and in the off-tissue (off-tumor) scenario the T-cell receives both the P-CAR and N-CAR signals, whereby the latter attenuates or terminates downstream signaling leading to impaired or no activation and cytotoxicity.

[0006] Therefore, there is a need for negative or inhibitory CAR (N-CAR) that can be used to generate a negative signal suitable to prevent off target activation of P-CAR T-cells (T-cells comprising a P-CAR). It would be an additional benefit if such negative signal is short-termed, reversible and sufficient to attenuate or prevent on-target off-tissue activity of CAR T-cells comprising such N-CAR.

### DETAILED DESCRIPTION OF THE INVENTION

[0007] General Techniques

[0008] The practice of the present invention will employ, unless otherwise indicated, conventional techniques of molecular biology (including recombinant techniques), microbiology, cell biology, biochemistry and immunology, which are within the skill of the art. Such techniques are explained fully in the literature, such as, Molecular Cloning: A Laboratory Manual, second edition (Sambrook et al., 1989) Cold Spring Harbor Press; Oligonucleotide Synthesis (M. J. Gait, ed., 1984); Methods in Molecular Biology, Humana Press; Cell Biology: A Laboratory Notebook (J. E. Cellis, ed., 1998) Academic Press; Animal Cell Culture (R. I. Freshney, ed., 1987); Introduction to Cell and Tissue Culture (J. P. Mather and P. E. Roberts, 1998) Plenum Press; Cell and Tissue Culture: Laboratory Procedures (A. Doyle, J. B. Griffiths, and D. G. Newell, eds., 1993-1998) J. Wiley and Sons; Methods in Enzymology (Academic Press, Inc.); Handbook of Experimental Immunology (D. M. Weir and C. C. Blackwell, eds.); Gene Transfer Vectors for Mammalian Cells (J. M. Miller and M. P. Calos, eds., 1987); Current Protocols in Molecular Biology (F. M. Ausubel et al., eds., 1987); PCR: The Polymerase Chain Reaction, (Mullis et al., eds., 1994); Current Protocols in Immunology (J. E. Coligan et al., eds., 1991); Short Protocols in Molecular Biology (Wiley and Sons, 1999); Immunobiology (C. A. Janeway and P. Travers, 1997); Antibodies (P. Finch, 1997); Antibodies: a practical approach (D. Catty., ed., IRL Press, 1988-1989); Monoclonal antibodies: a practical approach (P. Shepherd and C. Dean, eds., Oxford University Press, 2000); Using antibodies: a laboratory manual (E. Harlow and D. Lane (Cold Spring Harbor Laboratory Press, 1999); The Antibodies (M. Zanetti and J. D. Capra, eds., Harwood Academic Publishers, 1995).

[0009] Definitions

[0010] The following terms, unless otherwise indicated, shall be understood to have the following meanings: the term “isolated molecule” as referring to a molecule (where the molecule is, for example, a polypeptide, a polynucleotide, or an antibody) that by virtue of its origin or source of derivation (1) is not associated with naturally associated components that accompany it in its native state, (2) is substantially free of other molecules from the same source, e.g., species, cell from which it is expressed, library, etc., (3) is expressed by a cell from a different species, or (4) does not occur in nature. Thus, a molecule that is chemically synthesized, or expressed in a cellular system different from the system from which it naturally originates, will be “isolated” from its naturally associated components. A molecule also may be rendered substantially free of naturally associated components by isolation, using purification techniques well known in the art. Molecule purity or homogeneity may be assayed by a number of means well known in the art. For example, the purity of a polypeptide sample may be assayed using polyacrylamide gel electrophoresis and staining of the gel to visualize the polypeptide using techniques well known in the art. For certain purposes, higher resolution may be provided by using HPLC or other means well known in the art for purification.

[0011] An “antibody” is an immunoglobulin molecule capable of specific binding to a target, such as a carbohydrate, polynucleotide, lipid, polypeptide, etc., through at least one antigen recognition site, located in the variable region of the immunoglobulin molecule. As used herein, the term encompasses not only intact polyclonal or monoclonal antibodies, but also, unless otherwise specified, any antigen binding portion thereof that competes with the antibody for specific binding, fusion proteins comprising an antigen binding portion, and any other modified configuration of the immunoglobulin molecule that comprises an antigen recognition site. Antigen binding portions include, for example, Fab, Fab′, F(ab′)2, Fd, Fv, domain antibodies (dAbs, e.g., shark and camelid antibodies), fragments including complementarity determining regions (CDRs), single chain variable fragment antibodies (scFv), maxibodies, minibodies, intrabodies, diabodies, triabodies, tetrabodies, v-NAR and bis-scFv, and polypeptides that contain at least a portion of an immunoglobulin that is sufficient to confer specific antigen binding to the polypeptide. An antibody includes an antibody of any class, such as IgG, IgA, or IgM (or sub-class thereof), and the antibody need not be of any particular class. Depending on the antibody amino acid sequence of the constant region of its heavy chains, immunoglobulins can be assigned to different classes. There are five major classes of immunoglobulins: IgA, IgD, IgE, IgG, and IgM, and several of these may be further divided into subclasses (isotypes), e.g., IgG1, IgG2, IgG3, IgG4, IgA1 and IgA2. The heavy-chain constant regions that correspond to the different classes of immunoglobulins are called alpha, delta, epsilon, gamma, and mu, respectively. The subunit structures and three-dimensional configurations of different classes of immunoglobulins are well known.

[0012] A “variable region” of an antibody refers to the variable region of the antibody light chain or the variable region of the antibody heavy chain, either alone or in combination. As known in the art, the variable regions of the heavy and light chains each consist of four framework regions (FRs) connected by three complementarity determining regions (CDRs) also known as hypervariable regions, and contribute to the formation of the antigen binding site of antibodies. If variants of a subject variable region are desired, particularly with substitution in amino acid residues outside of a CDR region (e.g., in the framework region), appropriate amino acid substitution, preferably, conservative amino acid substitution, can be identified by comparing the subject variable region to the variable regions of other antibodies which contain CDR1 and CDR2 sequences in the same canonincal class as the subject variable region (Chothia and Lesk, J Mol Biol 196(4): 901-917, 1987).

[0013] In certain embodiments, definitive delineation of a CDR and identification of residues comprising the binding site of an antibody is accomplished by solving the structure of the antibody and/or solving the structure of the antibody-ligand complex. In certain embodiments, that can be accomplished by any of a variety of techniques known to those skilled in the art, such as X-ray crystallography. In certain embodiments, various methods of analysis can be employed to identify or approximate the CDR regions. In certain embodiments, various methods of analysis can be employed to identify or approximate the CDR regions. Examples of such methods include, but are not limited to, the Kabat definition, the Chothia definition, the AbM definition, the contact definition, and the conformational definition.

[0014] The Kabat definition is a standard for numbering the residues in an antibody and is typically used to identify CDR regions. See, e.g., Johnson & Wu, 2000, Nucleic Acids Res., 28: 214-8. The Chothia definition is similar to the Kabat definition, but the Chothia definition takes into account positions of certain structural loop regions. See, e.g., Chothia et al., 1986, J. Mol. Biol., 196: 901-17; Chothia et al., 1989, Nature, 342: 877-83. The AbM definition uses an integrated suite of computer programs produced by Oxford Molecular Group that model antibody structure. See, e.g., Martin et al., 1989, Proc Natl Acad Sci (USA), 86:9268-9272; “AbM™, A Computer Program for Modeling Variable Regions of Antibodies,” Oxford, UK; Oxford Molecular, Ltd. The AbM definition models the tertiary structure of an antibody from positive sequence using a combination of knowledge databases and ab initio methods, such as those described by Samudrala et al., 1999, “Ab Initio Protein Structure Prediction Using a Combined Hierarchical Approach,” in PROTEINS, Structure, Function and Genetics Suppl., 3:194-198. The contact definition is based on an analysis of the available complex crystal structures. See, e.g., MacCallum et al., 1996, J. Mol. Biol., 5:732-45. In another approach, referred to herein as the “conformational definition” of CDRs, the positions of the CDRs may be identified as the residues that make enthalpic contributions to antigen binding. See, e.g., Makabe et al., 2008, Journal of Biological Chemistry, 283:1156-1166. Still other CDR boundary definitions may not strictly follow one of the above approaches, but will nonetheless overlap with at least a portion of the Kabat CDRs, although they may be shortened or lengthened in light of prediction or experimental findings that particular residues or groups of residues do not significantly impact antigen binding. As used herein, a CDR may refer to CDRs defined by any approach known in the art, including combinations of approaches. The methods used herein may utilize CDRs defined according to any of these approaches. For any given embodiment containing more than one CDR, the CDRs may be defined in accordance with any of Kabat, Chothia, extended, AbM, contact, and/or conformational definitions.

[0015] As known in the art, a “constant region” of an antibody refers to the constant region of the antibody light chain or the constant region of the antibody heavy chain, either alone or in combination.

[0016] As used herein, “monoclonal antibody” refers to an antibody obtained from a population of substantially homogeneous antibodies, i.e., the individual antibodies comprising the population are identical except for possible naturally-occurring mutations that may be present in minor amounts. Monoclonal antibodies are highly specific, being directed against a single antigenic site. Furthermore, in contrast to polyclonal antibody preparations, which typically include different antibodies directed against different determinants (epitopes), each monoclonal antibody is directed against a single determinant on the antigen. The modifier “monoclonal” indicates the character of the antibody as being obtained from a substantially homogeneous population of antibodies, and is not to be construed as requiring production of the antibody by any particular method. For example, the monoclonal antibodies to be used in accordance with the present invention may be made by the hybridoma method first described by Kohler and Milstein, 1975, Nature 256:495, or may be made by recombinant DNA methods such as described in U.S. Pat. No. 4,816,567. The monoclonal antibodies may also be isolated from phage libraries generated using the techniques described in McCafferty et al., 1990, Nature 348:552-554, for example. As used herein, “humanized” antibody refers to forms of non-human (e.g. murine) antibodies that are chimeric immunoglobulins, immunoglobulin chains, or fragments thereof (such as Fv, Fab, Fab′, F(ab′)2 or other antigen-binding subsequences of antibodies) that contain minimal sequence derived from non-human immunoglobulin. Preferably, humanized antibodies are human immunoglobulins (recipient antibody) in which residues from a CDR of the recipient are replaced by residues from a CDR of a non-human species (donor antibody) such as mouse, rat, or rabbit having the desired specificity, affinity, and capacity. The humanized antibody may comprise residues that are found neither in the recipient antibody nor in the imported CDR or framework sequences, but are included to further refine and optimize antibody performance.

[0017] A “human antibody” is one which possesses an amino acid sequence which corresponds to that of an antibody produced by a human and/or has been made using any of the techniques for making human antibodies as disclosed herein. This definition of a human antibody specifically excludes a humanized antibody comprising non-human antigen binding residues.

[0018] The term “chimeric antibody” is intended to refer to antibodies in which the variable region sequences are derived from one species and the constant region sequences are derived from another species, such as an antibody in which the variable region sequences are derived from a mouse antibody and the constant region sequences are derived from a human antibody.

[0019] The term “epitope” refers to that portion of a molecule capable of being recognized by and bound by an antibody at one or more of the antibody's antigen-binding regions. Epitopes often consist of a surface grouping of molecules such as amino acids or sugar side chains and have specific three-dimensional structural characteristics as well as specific charge characteristics. In some embodiments, the epitope can be a protein epitope. Protein epitopes can be linear or conformational. In a linear epitope, all of the points of interaction between the protein and the interacting molecule (such as an antibody) occur linearly along the positive amino acid sequence of the protein. A “nonlinear epitope” or “conformational epitope” comprises noncontiguous polypeptides (or amino acids) within the antigenic protein to which an antibody specific to the epitope binds. The term “antigenic epitope” as used herein, is defined as a portion of an antigen to which an antibody can specifically bind as determined by any method well known in the art, for example, by conventional immunoassays. Once a desired epitope on an antigen is determined, it is possible to generate antibodies to that epitope, e.g., using the techniques described in the present specification. Alternatively, during the discovery process, the generation and characterization of antibodies may elucidate information about desirable epitopes. From this information, it is then possible to competitively screen antibodies for binding to the same epitope. An approach to achieve this is to conduct competition and cross-competition studies to find antibodies that compete or cross-compete with one another for binding to the antigen. The term “signaling domain” refers to the functional portion of a protein which acts by transmitting information within the cell to regulate cellular activity via defined signaling pathways by generating second messengers or functioning as effectors by responding to such messengers.

[0020] The term “off-tissue antigen” (or off-tumor antigen) refers to an antigen which is present on non-tumor tissue and not present on the tumor of interest (tumor to be treated by the cells of the invention comprising a P-CAR directed to a tumor antigen and a N-CAR directed to an off-tissue antigen), or only present on the tumor of interest at much lower levels compared to levels of tumor antigen (i.e. the antigen present on the tumor of interest and targeted by the P-CAR).

[0021] The term “anti-tumor effect” refers to a biological effect which can be manifested by various means, including but not limited to, e.g., a decrease in tumor volume, a decrease in the number of tumor cells, a decrease in the number of metastases, an increase in life expectancy, decrease in tumor cell proliferation, decrease in tumor cell survival, or amelioration of various physiological symptoms associated with the cancerous condition. An “anti-tumor effect” can also be manifested by the ability of the cells of the invention in prevention of the occurrence of tumor in the first place.

[0022] The term “autologous” refers to any material derived from the same individual to whom it is later to be re-introduced into the individual.

[0023] The term “allogeneic” refers to any material derived from a different animal of the same species as the individual to whom the material is introduced. Two or more individuals are said to be allogeneic to one another when the genes at one or more loci are not identical. In some aspects, allogeneic material from individuals of the same species may be sufficiently unlike genetically to interact antigenically

[0024] The term “xenogeneic” refers to a graft derived from an animal of a different species.

[0025] The term “cancer” refers to a disease characterized by the rapid and uncontrolled growth of aberrant cells. Cancer cells can spread locally or through the bloodstream and lymphatic system to other parts of the body. Examples of various cancers are described herein and include but are not limited to, breast cancer, prostate cancer, ovarian cancer, cervical cancer, skin cancer, pancreatic cancer, colorectal cancer, renal cell cancer, liver cancer, brain cancer, lymphoma, leukemia, lung cancer and the like.

[0026] The term “conservative sequence modifications” refers to amino acid modifications that do not significantly affect or alter the binding characteristics of the antibody or antibody fragment containing the amino acid sequence. Such conservative modifications include amino acid substitutions, additions and deletions. Modifications can be introduced into an antibody or antibody fragment of the invention by standard techniques known in the art, such as site- directed mutagenesis and PCR-mediated mutagenesis. Conservative amino acid substitutions are ones in which the amino acid residue is replaced with an amino acid residue having a similar side chain. Families of amino acid residues having similar side chains have been defined in the art. These families include amino acids with basic side chains (e.g., lysine, arginine, histidine), acidic side chains (e.g., aspartic acid, glutamic acid), uncharged polar side chains (e.g., glycine, asparagine, glutamine, serine, threonine, tyrosine, cysteine, tryptophan), nonpolar side chains (e.g., alanine, valine, leucine, isoleucine, proline, phenylalanine, methionine), beta-branched side chains (e.g., threonine, valine, isoleucine) and aromatic side chains (e.g., tyrosine, phenylalanine, tryptophan, histidine). Thus, one or more amino acid residues within a CAR of the invention can be replaced with other amino acid residues from the same side chain family and the altered CAR can be tested using the functional assays described herein.

[0027] In some embodiments, the “fragment” of a sequence of amino acids is shorter than said sequence of amino acid. In some embodiments, the fragment of a sequence of amino acids is at least 1%, 5% 10%, 20%, 40%, 50%, 60%, 70%, 80% or 90% shorter than said sequence of amino acids. In some embodiments, the fragment of a sequence of amino acids is shorter by at least 1, 5, 10, 20, 50, 100, 200, 300 amino acids as compared to said sequence of amino acids.

[0028] Unless otherwise specified, the left to right orientation of amino acid sequences or formula representing amino acid sequences are disclosed using the conventional left to right orientation N-Term to C-term.

[0029] N-terminal flanking region of a domain refers to the sequence of amino acid which is directly adjacent to the N-terminal amino acid of said domain. C-terminal flanking region of a domain refers to the sequence of amino acid which is directly adjacent to the C-terminal amino acid of said domain. For example, in the sequence seq1-ITIM-seq2, seq1 is the N-terminal flanking region of the ITIM intracellular domain and seq2 N-terminal flanking region of the ITIM intracellular domain. In another example, the naturally occurring N-terminal flanking region of ITIM.*ITSM intracellular domains is the sequence of amino acid which is directly adjacent to the N-terminal amino acid of the ITIM motif of the ITIM.*ITSM intracellular domain. In another example, the naturally occurring C-terminal flanking region of ITIM.*ITSM intracellular domain is the sequence of amino acid which is directly adjacent to the C-terminal amino acid of the ITSM motif of the ITIM.*ITSM intracellular domain.

[0030] In another example, the naturally occurring N-terminal flanking region of an ITIM only intracellular domain is the sequence of amino acid which is directly adjacent to the N-terminal amino acid of the ITIM of the ITIM only intracellular domain. In another example, the naturally occurring C-terminal flanking region of an ITIM only intracellular domain is the sequence of amino acid which is directly adjacent to the C-terminal amino acid of the ITIM of the ITIM only intracellular domain.

[0031] In another example, the naturally occurring N-terminal flanking region of an ITSM only intracellular domain is the sequence of amino acid which is directly adjacent to the N-terminal amino acid of the ITSM of the ITSM only intracellular domain. In another example, the naturally occurring C-terminal flanking region of an ITSM only intracellular domain is the sequence of amino acid which is directly adjacent to the C-terminal amino acid of the ITSM of the ITSM only intracellular domain.

[0032] The term “stimulation,” refers to a positive response induced by binding of a stimulatory molecule (e.g., a TCR/CD3 complex) with its cognate ligand thereby mediating a signal transduction event, such as, but not limited to, signal transduction via the TCR/CD3 complex. Stimulation can mediate altered expression of certain molecules, such as downregulation of TGF-β, and/or reorganization of cytoskeletal structures, and the like.

[0033] The term “antigen presenting cell” or “APC” refers to an immune system cell such as an accessory cell (e.g., a B-cell, a dendritic cell, and the like) that displays a foreign antigen complexed with major histocompatibility complexes (MHC's) on its surface. T-cells may recognize these complexes using their T-cell receptors (TCRs). APCs process antigens and present them to T-cells.

[0034] An “intracellular signaling domain,” as the term is used herein, refers to an intracellular portion of a molecule.

[0035] The term “encoding” refers to the inherent property of specific sequences of nucleotides in a polynucleotide, such as a gene, a cDNA, or an mRNA, to serve as templates for synthesis of other polymers and macromolecules in biological processes having either a defined sequence of nucleotides (e.g., rRNA, tRNA and mRNA) or a defined sequence of amino acids and the biological properties resulting therefrom. Thus, a gene, cDNA, or RNA, encodes a protein if transcription and translation of mRNA corresponding to that gene produces the protein in a cell or other biological system. Both the coding strand, the nucleotide sequence of which is identical to the mRNA sequence and is usually provided in sequence listings, and the non-coding strand, used as the template for transcription of a gene or cDNA, can be referred to as encoding the protein or other product of that gene or cDNA.

[0036] Unless otherwise specified, a “nucleotide sequence encoding an amino acid sequence” includes all nucleotide sequences that are degenerate versions of each other and that encode the same amino acid sequence. The phrase nucleotide sequence that encodes a protein or a RNA may also include introns to the extent that the nucleotide sequence encoding the protein may in some version contain an intron(s).

[0037] The term “effective amount” or “therapeutically effective amount” are used interchangeably herein, and refer to an amount of a compound, formulation, material, or composition, as described herein effective to achieve a particular biological result.

[0038] The term “endogenous” refers to any material from or produced inside an organism, cell, tissue or system.

[0039] The term “exogenous” refers to any material introduced from or produced outside an organism, cell, tissue or system.

[0040] The term “expression” refers to the transcription and/or translation of a particular nucleotide sequence driven by a promoter.

[0041] The term “transfer vector” refers to a composition of matter which comprises an isolated nucleic acid and which can be used to deliver the isolated nucleic acid to the interior of a cell. Numerous vectors are known in the art including, but not limited to, linear polynucleotides, polynucleotides associated with ionic or amphiphilic compounds, plasmids, and viruses. Thus, the term “transfer vector” includes an autonomously replicating plasmid or a virus. The term should also be construed to further include non-plasmid and non-viral compounds which facilitate transfer of nucleic acid into cells, such as, for example, a polylysine compound, liposome, and the like. Examples of viral transfer vectors include, but are not limited to, adenoviral vectors, adeno-associated virus vectors, retroviral vectors, lentiviral vectors, and the like.

[0042] The term “expression vector” refers to a vector comprising a recombinant polynucleotide comprising expression control sequences operatively linked to a nucleotide sequence to be expressed. An expression vector comprises sufficient cis-acting elements for expression; other elements for expression can be supplied by the host cell or in an in vitro expression system. Expression vectors include all those known in the art, including cosmids, plasmids (e.g., naked or contained in liposomes) and viruses (e.g., lentiviruses, retroviruses, adenoviruses, and adeno-associated viruses) that incorporate the recombinant polynucleotide.

[0043] The term “lentivirus” refers to a genus of the Retroviridae family. Lentiviruses are unique among the retroviruses in being able to infect non-dividing cells; they can deliver a significant amount of genetic information into the DNA of the host cell, so they are one of the most efficient methods of a gene delivery vector. HIV, SIV, and FIV are all examples of lentiviruses.

[0044] The term “lentiviral vector” refers to a vector derived from at least a portion of a lentivirus genome, including especially a self-inactivating lentiviral vector as provided in Milone et al., Mol. Ther. 17(8): 1453-1464 (2009). Other examples of lentivirus vectors that may be used in the clinic, include but are not limited to, e.g., the LENTIVECTOR® gene delivery technology from Oxford BioMedica, the LENTIMAX™ vector system from Lentigen and the like. Nonclinical types of lentiviral vectors are also available and would be known to one skilled in the art.

[0045] The term “homologous” or “identity” refers to the subunit sequence identity between two polymeric molecules, e.g., between two nucleic acid molecules, such as, two DNA molecules or two RNA molecules, or between two polypeptide molecules. When a subunit position in both of the two molecules is occupied by the same monomeric subunit; e.g., if a position in each of two DNA molecules is occupied by adenine, then they are homologous or identical at that position. The homology between two sequences is a direct function of the number of matching or homologous positions; e.g., if half (e.g., five positions in a polymer ten subunits in length) of the positions in two sequences are homologous, the two sequences are 50% homologous; if 90% of the positions (e.g., 9 of 10), are matched or homologous, the two sequences are 90% homologous.

[0046] The term “operably linked” or “transcriptional control” refers to functional linkage between a regulatory sequence and a heterologous nucleic acid sequence resulting in expression of the latter. For example, a first nucleic acid sequence is operably linked with a second nucleic acid sequence when the first nucleic acid sequence is placed in a functional relationship with the second nucleic acid sequence. For instance, a promoter is operably linked to a coding sequence if the promoter affects the transcription or expression of the coding sequence. Operably linked DNA sequences can be contiguous with each other and, e.g., where necessary to join two protein coding regions, are in the same reading frame.

[0047] The terms “polypeptide”, “oligopeptide”, “peptide” and “protein” are used interchangeably herein to refer to chains of amino acids of any length. The chain may be linear or branched, it may comprise modified amino acids, and/or may be interrupted by non-amino acids. The terms also encompass an amino acid chain that has been modified naturally or by intervention; for example, disulfide bond formation, glycosylation, lipidation, acetylation, phosphorylation, or any other manipulation or modification, such as conjugation with a labeling component. Also included within the definition are, for example, polypeptides containing one or more analogs of an amino acid (including, for example, unnatural amino acids, etc.), as well as other modifications known in the art. It is understood that the polypeptides can occur as single chains or associated chains.

[0048] As known in the art, “polynucleotide,” or “nucleic acid,” as used interchangeably herein, refer to chains of nucleotides of any length, and include DNA and RNA. The nucleotides can be deoxyribonucleotides, ribonucleotides, modified nucleotides or bases, and/or their analogs, or any substrate that can be incorporated into a chain by DNA or RNA polymerase. A polynucleotide may comprise modified nucleotides, such as methylated nucleotides and their analogs. If present, modification to the nucleotide structure may be imparted before or after assembly of the chain. The sequence of nucleotides may be interrupted by non-nucleotide components. A polynucleotide may be further modified after polymerization, such as by conjugation with a labeling component. Other types of modifications include, for example, “caps”, substitution of one or more of the naturally occurring nucleotides with an analog, internucleotide modifications such as, for example, those with uncharged linkages (e.g., methyl phosphonates, phosphotriesters, phosphoamidates, carbamates, etc.) and with charged linkages (e.g., phosphorothioates, phosphorodithioates, etc.), those containing pendant moieties, such as, for example, proteins (e.g., nucleases, toxins, antibodies, signal peptides, poly-L-lysine, etc.), those with intercalators (e.g., acridine, psoralen, etc.), those containing chelators (e.g., metals, radioactive metals, boron, oxidative metals, etc.), those containing alkylators, those with modified linkages (e.g., alpha anomeric nucleic acids, etc.), as well as unmodified forms of the polynucleotide(s). Further, any of the hydroxyl groups ordinarily present in the sugars may be replaced, for example, by phosphonate groups, phosphate groups, protected by standard protecting groups, or activated to prepare additional linkages to additional nucleotides, or may be conjugated to solid supports. The 5′ and 3′ terminal OH can be phosphorylated or substituted with amines or organic capping group moieties of from 1 to 20 carbon atoms. Other hydroxyls may also be derivatized to standard protecting groups. Polynucleotides can also contain analogous forms of ribose or deoxyribose sugars that are generally known in the art, including, for example, 2′-O-methyl-, 2′-O-allyl, 2′-fluoro- or 2′-azido-ribose, carbocyclic sugar analogs, alpha- or beta-anomeric sugars, epimeric sugars such as arabinose, xyloses or lyxoses, pyranose sugars, furanose sugars, sedoheptuloses, acyclic analogs and abasic nucleoside analogs such as methyl riboside. One or more phosphodiester linkages may be replaced by alternative linking groups. These alternative linking groups include, but are not limited to, embodiments wherein phosphate is replaced by P(O)S(“thioate”), P(S)S (“dithioate”), (O)NR₂ (“amidate”), P(O)R, P(O)OR′, CO or CH₂ (“formacetal”), in which each R or R′ is independently H or substituted or unsubstituted alkyl (1-20 C) optionally containing an ether (—O—) linkage, aryl, alkenyl, cycloalkyl, cycloalkenyl or araldyl. Not all linkages in a polynucleotide need be identical. The preceding description applies to all polynucleotides referred to herein, including RNA and DNA.

[0049] An antibody that “preferentially binds” or “specifically binds” (used interchangeably herein) to an epitope is a term well understood in the art, and methods to determine such specific or preferential binding are also well known in the art. A molecule is said to exhibit “specific binding” or “preferential binding” if it reacts or associates more frequently, more rapidly, with greater duration and/or with greater affinity with a particular cell or substance than it does with alternative cells or substances. An antibody “specifically binds” or “preferentially binds” to a target if it binds with greater affinity, avidity, more readily, and/or with greater duration than it binds to other substances.

[0050] A “host cell” includes an individual cell or cell culture that can be or has been a recipient for vector(s) for incorporation of polynucleotide inserts. Host cells include progeny of a single host cell, and the progeny may not necessarily be completely identical (in morphology or in genomic DNA complement) to the original parent cell due to natural, accidental, or deliberate mutation. A host cell includes cells transfected in vivo with a polynucleotide(s) of this invention.

[0051] The term “compete”, as used herein with regard to an antibody, means that a first antibody, or an antigen-binding portion thereof, binds to an epitope in a manner sufficiently similar to the binding of a second antibody, or an antigen-binding portion thereof, such that the result of binding of the first antibody with its cognate epitope is detectably decreased in the presence of the second antibody compared to the binding of the first antibody in the absence of the second antibody. The alternative, where the binding of the second antibody to its epitope is also detectably decreased in the presence of the first antibody, can, but need not be the case. That is, a first antibody can inhibit the binding of a second antibody to its epitope without that second antibody inhibiting the binding of the first antibody to its respective epitope. However, where each antibody detectably inhibits the binding of the other antibody with its cognate epitope or ligand, whether to the same, greater, or lesser extent, the antibodies are said to “cross-compete” with each other for binding of their respective epitope(s). Both competing and cross-competing antibodies are encompassed by the present invention. Regardless of the mechanism by which such competition or cross-competition occurs (e.g., steric hindrance, conformational change, or binding to a common epitope, or portion thereof), the skilled artisan would appreciate, based upon the teachings provided herein, that such competing and/or cross-competing antibodies are encompassed and can be useful for the methods disclosed herein.

[0052] As used herein, “treatment” is an approach for obtaining beneficial or desired clinical results.

[0053] As used herein, an “effective dosage” or “effective amount” of drug, compound, or pharmaceutical composition is an amount sufficient to effect any one or more beneficial or desired results. For prophylactic use, beneficial or desired results include eliminating or reducing the risk, lessening the severity, or delaying the outset of the disease, including biochemical, histological and/or behavioral symptoms of the disease, its complications and intermediate pathological phenotypes presenting during development of the disease. For therapeutic use, beneficial or desired results include clinical results such as reducing incidence or amelioration of one or more symptoms of various diseases or conditions (such as, for example without limitation, renal cell, gastric, head and neck, lung, ovarian, and pancreatic cancers), decreasing the dose of other medications required to treat the disease, enhancing the effect of another medication, and/or delaying the progression of the disease. An effective dosage can be administered in one or more administrations. For purposes of this invention, an effective dosage of drug, compound, or pharmaceutical composition is an amount sufficient to accomplish prophylactic or therapeutic treatment either directly or indirectly. As is understood in the clinical context, an effective dosage of a drug, compound, or pharmaceutical composition may or may not be achieved in conjunction with another drug, compound, or pharmaceutical composition. Thus, an “effective dosage” may be considered in the context of administering one or more therapeutic agents, and a single agent may be considered to be given in an effective amount if, in conjunction with one or more other agents, a desirable result may be or is achieved.

[0054] An “individual” or a “subject” is a mammal, more preferably, a human. Mammals also include, but are not limited to, farm animals, sport animals, pets, primates, horses, dogs, cats, mice and rats.

[0055] As used herein, “vector” means a construct, which is capable of delivering, and, preferably, expressing, one or more gene(s) or sequence(s) of interest in a host cell. Examples of vectors include, but are not limited to, viral vectors, naked DNA or RNA expression vectors, plasmid, cosmid or phage vectors, DNA or RNA expression vectors associated with cationic condensing agents, DNA or RNA expression vectors encapsulated in liposomes, and certain eukaryotic cells, such as producer cells.

[0056] As used herein, “expression control sequence” means a nucleic acid sequence that directs transcription of a nucleic acid. An expression control sequence can be a promoter, such as a constitutive or an inducible promoter, or an enhancer. The expression control sequence is operably linked to the nucleic acid sequence to be transcribed.

[0057] The term “promoter” refers to a DNA sequence recognized by the synthetic machinery of the cell, or introduced synthetic machinery, required to initiate the specific transcription of a polynucleotide sequence.

[0058] The term “promoter/regulatory sequence” refers to a nucleic acid sequence which is required for expression of a gene product operably linked to the promoter/regulatory sequence. In some instances, this sequence may be the core promoter sequence and in other instances, this sequence may also include an enhancer sequence and other regulatory elements which are required for expression of the gene product. The promoter/regulatory sequence may, for example, be one which expresses the gene product in a tissue specific manner.

[0059] The term “constitutive” promoter refers to a nucleotide sequence which, when operably linked with a polynucleotide which encodes or specifies a gene product, causes the gene product to be produced in a cell under most or all physiological conditions of the cell.

[0060] The term “inducible” promoter refers to a nucleotide sequence which, when operably linked with a polynucleotide which encodes or specifies a gene product, causes the gene product to be produced in a cell substantially only when an inducer which corresponds to the promoter is present in the cell.

[0061] The term “tissue-specific” promoter refers to a nucleotide sequence which, when operably linked with a polynucleotide encodes or specified by a gene, causes the gene product to be produced in a cell substantially only if the cell is a cell of the tissue type corresponding to the promoter.

[0062] The term “flexible polypeptide linker” or “linker” as used in the context of a scFv refers to a peptide linker that consists of amino acids such as glycine and/or serine residues used alone or in combination, to link variable heavy and variable light chain regions together. In one embodiment, the flexible polypeptide linker is a Glycine/Serine linker and comprises the amino acid sequence (Gly-Gly-Gly-Ser)ₙ or (Gly-Gly-Gly-Gly-Ser)ₙ, where n is a positive integer equal to or greater than 1. For example, n=1, n=2, n=3, n=4, n=5, n=6, n=7, n=8, n=9 and n=10. In one embodiment, the flexible polypeptide linkers include, but are not limited to, (Gly₄Ser)₄ or (Gly₄Ser)₃. In another embodiment, the linkers include multiple repeats of (GlyₓSer)ₙ, where x=1, 2, 3, 4 or 5 and n is 1, 2, 3, 4, 5, 6, 7, 8, 9 or 10, such as multiple repeat of (GlySer), (Gly₂Ser) or (Gly₅Ser). Also included within the scope of the invention are linkers described in WO2012/138475, incorporated herein by reference.

[0063] As used herein, a 5′ cap (also termed an RNA cap, an RNA 7-methylguanosine cap or an RNA m G cap) is a modified guanine nucleotide that has been added to the “front” or 5′ end of a eukaryotic messenger RNA shortly after the start of transcription. The 5′ cap consists of a terminal group which is linked to the first transcribed nucleotide. Its presence is critical for recognition by the ribosome and protection from RNases. Cap addition is coupled to transcription, and occurs co-transcriptionally, such that each influences the other. Shortly after the start of transcription, the 5′ end of the mRNA being synthesized is bound by a cap- synthesizing complex associated with RNA polymerase. This enzymatic complex catalyzes the chemical reactions that are required for mRNA capping. Synthesis proceeds as a multi- step biochemical reaction. The capping moiety can be modified to modulate functionality of mRNA such as its stability or efficiency of translation.

[0064] As used herein, “in vitro transcribed RNA” refers to RNA, preferably mRNA, that has been synthesized in vitro. Generally, the in vitro transcribed RNA is generated from an in vitro transcription vector. The in vitro transcription vector comprises a template that is used to generate the in vitro transcribed RNA.

[0065] As used herein, a “poly(A)” is a series of adenosines attached by polyadenylation to the mRNA. In the preferred embodiment of a construct for transient expression, the polyA is between 50 and 5000, preferably greater than 64, more preferably greater than 100, most preferably greater than 300 or 400. poly(A) sequences can be modified chemically or enzymatically to modulate mRNA functionality such as localization, stability or efficiency of translation.

[0066] As used herein, “polyadenylation” refers to the covalent linkage of a polyadenylyl moiety, or its modified variant, to a messenger RNA molecule. In eukaryotic organisms, most messenger RNA (mRNA) molecules are polyadenylated at the 3′ end. The 3′ poly(A) tail is a long sequence of adenine nucleotides (often several hundred) added to the pre-mRNA through the action of an enzyme, polyadenylate polymerase. In higher eukaryotes, the poly(A) tail is added onto transcripts that contain a specific sequence, the polyadenylation signal. The poly(A) tail and the protein bound to it aid in protecting mRNA from degradation by exonucleases. Polyadenylation is also important for transcription termination, export of the mRNA from the nucleus, and translation. Polyadenylation occurs in the nucleus immediately after transcription of DNA into RNA, but additionally can also occur later in the cytoplasm. After transcription has been terminated, the mRNA chain is cleaved through the action of an endonuclease complex associated with RNA polymerase. The cleavage site is usually characterized by the presence of the base sequence AAUAAA near the cleavage site. After the mRNA has been cleaved, adenosine residues are added to the free 3′ end at the cleavage site.

[0067] As used herein, “transient” refers to expression of a non-integrated transgene for a period of hours, days or weeks, wherein the period of time of expression is less than the period of time for expression of the gene if integrated into the genome or contained within a stable plasmid replicon in the host cell.

[0068] The term “signal transduction pathway” refers to the biochemical relationship between a variety of signal transduction molecules that play a role in the transmission of a signal from one portion of a cell to another portion of a cell. The phrase “cell surface receptor” includes molecules and complexes of molecules capable of receiving a signal and transmitting signal across the membrane of a cell.

[0069] Reference to “about” a value or parameter herein includes (and describes) embodiments that are directed to that value or parameter per se. For example, description referring to “about X” includes description of “X.” Numeric ranges are inclusive of the numbers defining the range.

[0070] It is understood that wherever embodiments are described herein with the language “comprising,” otherwise analogous embodiments described in terms of “consisting of” and/or “consisting essentially of” are also provided.

[0071] Where aspects or embodiments of the invention are described in terms of a Markush group or other grouping of alternatives, the present invention encompasses not only the entire group listed as a whole, but each member of the group individually and all possible subgroups of the main group, but also the main group absent one or more of the group members. The present invention also envisages the explicit exclusion of one or more of any of the group members in the claimed invention.

[0072] Unless otherwise defined, all technical and scientific terms used herein have the same meaning as commonly understood by one of ordinary skill in the art to which this invention belongs. In case of conflict, the present specification, including definitions, will control. Throughout this specification and claims, the word “comprise,” or variations such as “comprises” or “comprising” will be understood to imply the inclusion of a stated integer or group of integers but not the exclusion of any other integer or group of integers. Unless otherwise required by context, singular terms shall include pluralities and plural terms shall include the singular. Any example(s) following the term “e.g.” or “for example” is not meant to be exhaustive or limiting.

[0073] Exemplary methods and materials are described herein, although methods and materials similar or equivalent to those described herein can also be used in the practice or testing of the present invention. The materials, methods, and examples are illustrative only and not intended to be limiting.

### DESCRIPTION OF FIGURES

[0074] FIGS. 1 and 2 show the dual cell surface expression of P-CAR1 and various N-CARs assessed by multicolor flow cytometry in transduced NFAT-luciferase reporter Jurkat cells.

[0075] FIGS. 3 and 4 show the dual cell surface expression of P-CAR1 and various N-CARs assessed by multicolor flow cytometry in transduced NFkB-luciferase reporter Jurkat cells. In FIGS. 1 to 4, P-CAR expression was detected using a recombinant human CD19-mouse IgG Fc fusion protein followed by APC-conjugated F(ab′)2 goat anti-mouse Fcy (shown on x axis), and N-CAR expression was detected with a biotinylated recombinant human PSMA-human IgG1 Fc fusion protein followed by PE-conjugated streptavidin (y axis).

[0076] FIGS. 5A, 5B and 5C show the inhibitory effect of various N-CARs on P-CAR1 induced T cell activation. Control ΔPD1- or test N-CAR-transduced luciferase reporter Jurkat cells expressing P-CAR1 were incubated with either CD19-expressing AAPCs or dual CD19+PSMA-expressing AAPCs, and luciferase activity was assessed 16 h later. Data are expressed as a ratio of the mean RLU from co-culture with CD19+PSMA AAPCs/CD19 AAPCs. n=6 replicates per sample; data shown are the means+/− 95% Cl). FIGS. 5A/5C and 5B show results using NFAT-luciferase reporter and NFkB-luciferase reporter Jurkat cells, respectively.

[0077] FIGS. 6 and 7 show the dual cell surface expression of P-CAR2 and and N-CARs listed in Table 10 assessed by multicolor flow cytometry in transduced NFAT-luciferase reporter Jurkat cells. FIGS. 8 and 9 show the dual cell surface expression of P-CAR2 and N-CARs listed in Table 10 assessed by multicolor flow cytometry in transduced NFkB-luciferase reporter Jurkat cells. In FIGS. 6 to 9, P-CAR expression was detected using a recombinant human CD19-mouse IgG Fc fusion protein followed by APC-conjugated F(ab′)2 goat anti-mouse Fcy (shown on x axis), and N-CAR expression was detected with a biotinylated recombinant human PSMA-human IgG1 Fc fusion protein followed by PE-conjugated streptavidin (y axis).

[0078] FIGS. 10A and 10B show the inhibitory effect of various N-CARs on P-CAR2 induced T cell activation. Control ΔPD1- or test N-CAR-transduced luciferase reporter Jurkat cells expressing P-CAR2 were incubated with either CD19-expressing or dual PSMA/CD19-expressing AAPCs, and luciferase activity was assessed 16h later. Data are expressed as a ratio of the mean RLU from co-culture with CD19+PSMA AAPCs/CD19 AAPCs. n=6 replicates per sample; data shown are the means +/− 95%Cl. FIGS. 10A and 10B show results using NFAT-luciferase reporter and NFkB-luciferase reporter Jurkat cells, respectively.

### DETAILED DESCRIPTION

[0079] The invention relates to a negative signal (or inhibitory) chimeric antigen receptor (N-CAR) comprising

[0080] an extracellular domain comprising an antigen binding domain,

[0081] a transmembrane domain, and,

[0082] an intracellular domain

[0083] wherein the intracellular domain comprises an immunoreceptor Tyrosine-based Switch Motif ITSM, wherein said ITSM is a sequence of amino acid TX₁YX₂X₃X₄, wherein

[0084] X₁ is an amino acid,

[0085] X₂ is an amino acid,

[0086] X₃ is an amino acid, and,

[0087] X₄ is V or I.

[0088] In some embodiments the term amino acid refers to a natural amino acid. In some embodiments, the term amino acid refer to an amino acid selected from glycine, alanine, valine, leucine, isoleucine, phenylalanine, proline, serine, threonine, tyrosine, cysteine, methionine, lysine, arginine, histidine, tryptophan, aspartic acid, glutamic acid, asparagine or glutamine.

[0089] In some embodiments, when the extracellular domain is a scFv against PSMA, then the intracellular domain is not the intracellular domain of human PD-1.

[0090] In some embodiments, the intracellular domain is not the intracellular domain of human PD-1.

[0091] In some embodiments, the intracellular domain is not the intracellular domain of human BTLA.

[0092] In some embodiments, the intracellular domain is not the intracellular domain of human CD244.

[0093] In some embodiments, the intracellular domain is not SEQ ID No 2000, SEQ ID No 2001 or SEQ ID No 2002.

[0094] In some embodiments, the extracellular domain does not bind to PMSA.

[0095] In some embodiments, the intracellular domain does not comprise the full intracellular domain of PD-1.

[0096] In some embodiments, the ITSM is not TEYATI.

[0097] The intracellular domain or region of the N-CAR includes an inhibitory intracellular signaling domain. An inhibitory intracellular signaling domain is generally responsible for inactivation of the signal from a positive intracellular signaling domain from a P-CAR on the same immune cell in which the N-CAR has been introduced, thereby blocking activation of a normal effector function of the immune cell. The term “effector function” refers to a specialized function of a cell. Effector function of a T-cell, for example, may be cytolytic activity or helper activity including the secretion of cytokines.

[0098] Intracellular Domain of the N-CAR

[0099] In some embodiments, the intracellular domain comprises the following sequence: ((L1-ITIM-L2)ⁿ-(L3-ITSM-L4)^{m})^{p}, wherein

[0100] n is 0, 1 or an integer greater than 1;

[0101] m is 1 or an integer greater than 1;

[0102] p is 1 or an integer greater than 1;

[0103] L1 is absent or comprises one or more, preferably one, sequences selected from the group consisting of:
[0104] (a) a naturally occurring N-terminal flanking region of an ITIM only intracellular domain or a fragment thereof such as, for example, any of the sequences shown in Table 3 below or a fragment thereof;
[0105] (b) a naturally occurring N-terminal flanking region of an ITIM.*ITSM intracellular domain or a fragment thereof, such as, for example, any of the sequences shown in Table 1 below or a fragment thereof;
[0106] (c) a naturally occurring intracellular domain from a known inhibitory receptor such as any of the sequences shown in table 2 or a fragment thereof, wherein said intracellular domain is N-terminally flanking to a sequence in (b) above; and
[0107] (d) a non-naturally occurring sequence comprising between 1 and 500 amino acids;

[0108] each of L2 and L3 is absent or comprises one or more, preferably one, sequences selected from the group consisting of:
[0109] (e) a naturally occurring C-terminal flanking region of an ITIM only intracellular domain, such as, for example, any of the sequences shown in Table 4 below or a fragment thereof;
[0110] (f) a naturally occurring N-terminal flanking region of an ITSM only intracellular domain such as, for example, any of the sequences shown in Table 6 below or a fragment thereof;
[0111] (g) a naturally occurring intracellular domain between ITIM and ITSM from proteins that have ITIM.*ITSM motif such as, for example, any of the sequences shown in Table 5 below or a fragment thereof;
[0112] (h) a naturally occurring intracellular domain from a known inhibitory receptor such as any of the sequences shown in table 2 or a fragment thereof, wherein said intracellular domain is N-terminally flanking to a sequence in (f) or (g) above; and
[0113] (i) a non-naturally occurring sequence comprising between 1 and 500 amino acids; and

[0114] L4 is absent or comprises one or more, preferably one, sequences selected from the group consisting of:
[0115] (j) a naturally occurring C-terminal flanking region of an ITIM.*ITSM intracellular domain or a fragment thereof such as, for example, any of the sequences shown in Table 7 below or a fragment thereof;
[0116] (k) a naturally occurring C-terminal flanking region of an ITSM only intracellular domain such as, for example, any of the sequences shown in Table 8 below or a fragment thereof;
[0117] (i) a naturally occurring intracellular domain from a known inhibitory receptor such as any of the sequences shown in table 2 or a fragment thereof wherein said intracellular domain is C-terminally flanking to a sequence in (j) or (k) above; and
[0118] (m) a non-naturally occurring sequence comprising between 1 and 500 amino acids, and, wherein,

[0119] the ITIM is the sequence X₅X₆YX₇X₈X₉, wherein

[0120] X₅ is S, V, I or L,

[0121] X₆ is an amino acid,

[0122] X₇ is an amino acid,

[0123] X₈ is an amino acid, and,

[0124] X₉ is V, I or L, and,

[0125] the ITSM is the sequence TX₁YX₂X₃X₄, wherein

[0126] X₁ is an amino acid,

[0127] X₂ is an amino acid,

[0128] X₃ is an amino acid, and,

[0129] X₄ is V or I,

[0130] or a variant thereof.

[0131] In some embodiments, the known inhibitory receptor refers to an inhibitory receptor comprising an extracellular domain, a transmembrane domain and an intracellular domain which do not comprise any ITIM or ITSM and which provides a negative signal able to reduce the activation signal provided by the TCR/CD3 complex in a T-cell.

[0132] In some embodiments, the known inhibitory receptor refers to an inhibitory receptor comprising an extracellular domain, a transmembrane domain and an intracellular domain which provide a negative signal able to reduce the activation signal provided by the TCR/CD3 complex in a T-cell.

[0133] In some embodiments, the known inhibitory receptor is selected from CTLA4, LAG3 HAVCR2 (TIM3), KIR2DL2, LILRB1, TIGIT, CEACAM1, CSF1R, CDS, CD96, CD22 and LAIR1. In a preferred embodiment, the known inhibitory receptor is KIR2DL2.

[0134] ITIM.*ITSM intracellular domain refers to a domain comprising one ITIM and one ITSM.

[0135] ITSM only intracellular domain refers to a domain comprising one ITSM and no ITIM.

[0136] ITIM only intracellular domain refers to a domain comprising one ITIM and no ITSM.

[0137] When one or more of n, m or p are greater than 1, each occurrence of L1, L2, L3, L4, ITIM and ITSM is selected independently from the other. For example, the intracellular domain of the N-CAR may comprise several ITSM having different sequences.

[0138] In some embodiments, L1 is absent or comprises one or more, preferably one, sequences selected from the group consisting of:
[0139] (a) a naturally occurring N-terminal flanking region of ITIM only intracellular domains selected from

YKMYGSEMLHKRDPLDEDEDTD
DHWALTQRTARAVSPQSTKPMAES
CSRAARGTIGARRTGQPLKEDPSAVPVFS
HRQNQIKQGPPRSKDEEQKPQQRPDLAVDVLERTADKATVNGLPEKDRET
DTSALAAGSSQE
KTHRRKAARTAVGRNDTHPTTGSASPKHQKKSKLHGPTETSSCSGAAPTV
EMDEE
LTRKKKALRIHSVEGDLRRKSAGQEEWSPSAPSPPGSCVQAEAAPAGLCG
EQRGEDCAELHDYFNV
KCYFLRKAKAKQMPVEMSRPAVPLLNSNNEKMSDPNMEANSHYGHNDDVR
NHAMKPINDNKEPLNSD
RRHQGKQNELSDTAGREINLVDAHLKSEQTEASTRQNSQVLLSETGIYDN
DPDLCFRMQEGSEVYSNPCLEENKPG
WRMMKYQQKAAGMSPEQVLQPLEGDLCYADLTLQLAGTSPQKATTKLSSA
QVDQVEVEYVTMASLPKED
KRVQETKFGNAFTEEDSELVVNYIAKKSFCRRAIELTLHSLGVSEELQNK
LEDVVIDRNLLILGKILGEGEFGSVMEGNLKQEDGTSLKVAVKTMKLDNS
SQREIEEFLSEAACMKDFSHPNVIRLLGVCIEMSSQGIPKPMVILPFMKY
GDLHTY

[0140] (b) a naturally occurring N-terminal flanking region of ITIM.*ITSM intracellular domains selected from

YKMYGSEMLHKRDPLDEDEDTD
WRMMKYQQKAAGMSPEQVLQPLEGD
CSRAARGTIGARRTGQPLKEDPSAVPVFS
RIRQKKAQGSTSSTRLHEPEKNAREITQDTND
KTHRRKAARTAVGRNDTHPTTGSASPKHQKKSKLHGPTETSSCSGAAPTV
EMDEE
KCYFLRKAKAKQMPVEMSRPAVPLLNSNNEKMSDPNMEANSHYGHNDDVR
NHAMKPINDNKEPLNSD
RRHQGKQNELSDTAGREINLVDAHLKSEQTEASTRQNSQVLLSETGIYDN
DPDLCFRMQEGSEVYSNPCLEENKPG
KRVQETKFGNAFTEEDSELVVNYIAKKSFCRRAIELTLHSLGVSEELQNK
LEDVVIDRNLLILGKILGEGEFGSVMEGNLKQEDGTSLKVAVKTMKLDNS
SQREIEEFLSEAACMKDFSHPNVIRLLGVCIEMSSQGIPKPMVILPFMKY
GDLHTY

[0141] (c) a naturally occurring intracellular domain from a known inhibitory receptor selected from the sequences shown in table 2, wherein said intracellular domain is N- terminally flanking to a sequence in (b) above; and
[0142] (d) a non-naturally occurring sequence comprising between 1 and 500 amino acids.

[0143] In some embodiments, each of L2 and L3 is absent or comprises one or more, preferably one, sequences selected from the group consisting of:
[0144] (e) a naturally occurring C-terminal flanking region of ITIM only intracellular domains selected from;

GNCSFFTETG
NFHGMNPSKDTSTEYSEVRTQ
KEEEMADTSYGTVKAENIIMMETAQTSL
NHSVIGPNSRLARNVKEAPTEYASICVRS
DHWALTQRTARAVSPQSTKPMAESITYAAVARH
QVSSAESHKDLGKKDTETVYSEVRKAVPDAVESRYSRTEGSLDGT
DFQWREKTPEPPVPCVPEQTEYATIVFPSGMGTSSPARRGSADGPRSAQP
LRPEDGHCSWPL
NLPKGKKPAPQAAEPNNHTEYASIQTSPQPASEDTLTYADLDMVHLNRTP
KQPAPKPEPSFSEYASVQVPRK
TLQLAGTSPQKATTKLSSAQVDQVEVEYVTMASLPKEDISYASLTLGAED
QEPTYCNMGHLSSHLPGRGPEEPTEYSTISRP
ETGPKHIPLQTLLKFMVDIALGMEYLSNRNFLHRDLAARNCMLRDDMTVC
VADFGLSKKIYSGDYYRQGRIAKMPVKWIAIESLADRVYTSKSDVWAFGV
TMWEIATRGMTPYPGVQNHEMYDYLLHGHRLKQPEDCLDELYEIMYSCWR
TDPLDRPTFSVLRLQLEKLLESLPDVRNQADVIYVNTQLLESSEGLAQGS
TLAPLDLNIDPDSIIASCTPRAAISVVTAEVHDSKPHEGRYILNGGSEEW
EDLTSAPSAAVTAEKNSVLPGERLVRNGVSWSHSSMLPLGSSLPDELLFA
DDSSEGSEVLM

[0145] (f) a naturally occurring N-terminal flanking region of ITSM only intracellular domains selected from;

YKMYGSEMLHKRDPLDEDEDTDISYKKLKEEEMAD
CSRAARGTIGARRTGQPLKEDPSAVPVFSVDYGELDFQWREKTPEPPVPC
VPEQ
RIRQKKAQGSTSSTRLHEPEKNAREITQDTNDITYADLNLPKGKKPAPQA
AEPNNH
KTHRRKAARTAVGRNDTHPTTGSASPKHQKKSKLHGPTETSSCSGAAPTV
EMDEELHYASLNFHGMNPSKDTS
KCYFLRKAKAKQMPVEMSRPAVPLLNSNNEKMSDPNMEANSHYGHNDDVR
NHAMKPINDNKEPLNSDVQYTEVQVSSAESHKDLGKKDTE
RRHQGKQNELSDTAGREINLVDAHLKSEQTEASTRQNSQVLLSETGIYDN
DPDLCFRMQEGSEVYSNPCLEENKPGIVYASLNHSVIGPNSRLARNVKEA
P
WRMMKYQQKAAGMSPEQVLQPLEGDLCYADLTLQLAGTSPQKATTKLSSA
QVDQVEVEYVTMASLPKEDISYASLTLGAEDQEPTYCNMGHLSSHLPGRG
PEEP
WRRKRKEKQSETSPKEFLTIYEDVKDLKTRRNHEQEQTFPGGGSTIYSMI
QSQSSAPTSQEPAYTLYSLIQPSRKSGSRKRNHSPSFNS
VRSCRKKSARPAAGVGDTGIEDANAVRGSASQGPLTEPWAEDSPPDQPPP
ASARSSVGEGELQYASLSFQMVKPWDSRGQEATD
NKCGRRNKFGINRPAVLAPEDGLAMSLHFMTLGGSSLSPTEGKGSGLQGH
IIENPQYFSDACVHHIKRRDIVLKWELGEGAFGKVFLAECHNLLPEQDKM
LVAVKALKEASESARQDFQREAELLTMLQHQHIVRFFGVCTEGRPLLMVF
EYMRHGDLNRFLRSHGPDAKLLAGGEDVAPGPLGLGQLLAVASQVAAGMV
YLAGLHFVHRDLATRNCLVGQGLVVKIGDFGMSRDIYS
KLARHSKFGMKGPASVISNDDDSASPLHHISNGSNTPSSSEGGPDAVIIG
MTKIPVIENPQYFGITNSQLKPDTFVQHIKRHNIVLKRELGEGAFGKVFL
AECYNLCPEQDKILVAVKTLKDASDNARKDFHREAELLTNLQHEHIVKFY
GVCVEGDPLIMVFEYMKHGDLNKFLRAHGPDAVLMAEGNPPTELTQSQML
HIAQQIAAGMVYLASQHFVHRDLATRNCLVGENLLVKIGDFGMSRDVYS
KRKGRCSVPAFCSSQAEAPADTPEPTAGHTLYSVLSQGYEKLDTPLRPAR
QQPTPTSDSSSDSNLTTEEDEDRPEVHKPISGRYEVFDQVTQEGAGHDPA
PEGQADYDPVTPYVTEVESVVGENTMYAQVFNLQGKTPVSQKEESSA
KRVQETKFGNAFTEEDSELVVNYIAKKSFCRRAIELTLHSLGVSEELQNK
LEDVVIDRNLLILGKILGEGEFGSVMEGNLKQEDGTSLKVAVKTMKLDNS
SQREIEEFLSEAACMKDFSHPNVIRLLGVCIEMSSQGIPKPMVILPFMKY
GDLHTYLLYSRLETGPKHIPLQTLLKFMVDIALGMEYLSNRNFLHRDLAA
RNCMLRDDMTVCVADFGLSKKIYSGDYYRQGRIAKMPVKWIAIESLADRV
YTSKSDVWAFGVTMWEIATRGM

[0146] (g) a naturally occurring intracellular domain between ITIM and ITSM from proteins that have ITIM.*ITSM motif selected from;

KEEEMAD
NFHGMNPSKDTS
QVSSAESHKDLGKKDTE
NLPKGKKPAPQAAEPNNH
NHSVIGPNSRLARNVKEAP
DFQWREKTPEPPVPCVPEQ
TLQLAGTSPQKATTKLSSAQVDQVEVEYVTMASLPKEDISYASLTLGAED
QEPTYCNMGHLSSHLPGRGPEEP
ETGPKHIPLQTLLKFMVDIALGMEYLSNRNFLHRDLAARNCMLRDDMTVC
VADFGLSKKIYSGDYYRQGRIAKMPVKWIAIESLADRVYTSKSDVWAFGV
TMWEIATRGM

[0147] (h) a naturally occurring intracellular domain from known inhibitory receptors selected from the sequences shown in table 2 wherein said intracellular domain is N-terminally flanking to a sequence in (f) or (g) above; and
[0148] (i) a non-naturally occurring sequence comprising between 1 and 500 amino acids.

[0149] In some embodiments, L4 is absent or comprises one or more, preferably one, sequences selected from the group consisting of:
[0150] (j) a naturally occurring C-terminal flanking region of ITIM.*ITSM intracellular domains selected from:

SRP
RTQ
CVRS
KAENIIMMETAQTSL
RKAVPDAVESRYSRTEGSLDGT
VFPSGMGTSSPARRGSADGPRSAQPLRPEDGHCSWPL
QTSPQPASEDTLTYADLDMVHLNRTPKQPAPKPEPSFSEYASVQVPRK
QNHEMYDYLLHGHRLKQPEDCLDELYEIMYSCWRTDPLDRPTFSVLRLQL
EKLLESLPDVRNQADVIYVNTQLLESSEGLAQGSTLAPLDLNIDPDSIIA
SCTPRAAISVVTAEVHDSKPHEGRYILNGGSEEWEDLTSAPSAAVTAEKN
SVLPGERLVRNGVSWSHSSMLPLGSSLPDELLFADDSSEGSEVLM

[0151] (k) a naturally occurring C-terminal flanking region of ITSM only intracellular domain selected from

RTQ
SRP
KIHR
CVRS
KAENIIMMETAQTSL
RKAVPDAVESRYSRTEGSLDGT
RKPQVVPPPQQNDLEIPESPTYENFT
GKSQPKAQNPARLSRKELENFDVYS
VFPSGMGTSSPARRGSADGPRSAQPLRPEDGHCSWPL
QTSPQPASEDTLTYADLDMVHLNRTPKQPAPKPEPSFSEYASVQVPRK
FNLQGKTPVSQKEESSATIYCSIRKPQVVPPPQQNDLEIPESPTYENFT
GGRTMLPIRWMPPESILYRKFTTESDVWSFGVVLWEIFTYGKQPWYQLSN
TEAIDCITQGRELERPRACPPEVYAIMRGCWQREPQQRHSIKDVHARLQA
LAQAPPVYLDVLG
GGHTMLPIRWMPPESIMYRKFTTESDVWSLGVVLWEIFTYGKQPWYQLSN
NEVIECITQGRVLQRPRTCPQEVYELMLGCWQREPHMRKNIKGIHTLLQN
LAKASPVYLDILG
QNHEMYDYLLHGHRLKQPEDCLDELYEIMYSCWRTDPLDRPTFSVLRLQL
EKLLESLPDVRNQADVIYVNTQLLESSEGLAQGSTLAPLDLNIDPDSIIA
SCTPRAAISVVTAEVHDSKPHEGRYILNGGSEEWEDLTSAPSAAVTAEKN
SVLPGERLVRNGVSWSHSSMLPLGSSLPDELLFADDSSEGSEVLM
KDLKTRRNHEQEQTFPGGGSTIYSMIQSQSSAPTSQEPAYTLYSLIQPSR
KSGSRKRNHSPSFNSTIYEVIGKSQPKAQNPARLSRKELENFDVYS

[0152] (l) a naturally occurring intracellular domain from a known inhibitory receptor selected from the sequences shown in table 2 wherein said intracellular domain is C-terminally flanking to a sequence in (j) or (k) above; and
[0153] (m) a non-naturally occurring sequence comprising between 1 and 500 amino acids.

[0154] In some embodiments the intracellular domain comprises the sequence (L3-ITSM-L4)^{m} (i.e, n is 0 and p is 1).

[0155] In some embodiments, the intracellular domain comprises the sequence L3-ITSM-L4 (i.e, n is 0, m is 1 and p is 1).

[0156] In some embodiments, the intracellular domain comprises the sequence L3-ITSM-L4-L3- ITSM-L4 (i.e, n is 0, m is 2 and p is 1).

[0157] In some embodiments, the intracellular domain comprises the following sequence: ((L1-ITIM-L2)ⁿ-(L3-ITSM-L4)^{m})^{p}, wherein

[0158] n is 0;

[0159] m is 1;

[0160] p is 1;

[0161] L3 comprises one sequence selected from
[0162] (f) a naturally occurring N-terminal flanking region of an ITSM only intracellular domain such as, for example, any of the sequences shown in Table 6 below or a fragment thereof; or,
[0163] (i) a non-naturally occurring sequence comprising between 1 and 500 amino acids; and

[0164] L4 comprises one or more, preferably one or two, sequences selected from the group consisting of:
[0165] (k) a naturally occurring C-terminal flanking region of an ITSM only intracellular domain such as, for example, any of the sequences shown in Table 8 below or a fragment thereof;
[0166] (l) a naturally occurring intracellular domain from a known inhibitory receptor such as any of the sequences shown in table 2 or a fragment thereof wherein said intracellular domain is C-terminally flanking to a sequence in (k) above; and
[0167] (m) a non-naturally occurring sequence comprising between 1 and 500 amino acids, and, wherein,

[0168] the ITSM is the sequence TX₁YX₂X₃X₄, wherein

[0169] X₁ is an amino acid,

[0170] X₂ is an amino acid,

[0171] X₃ is an amino acid, and,

[0172] X₄ is V or I,

[0173] or a variant thereof.

[0174] In some embodiments, the intracellular domain comprises the following sequence: ((L1-ITIM-L2)ⁿ-(L3-ITSM-L4)^{m})^{p}, wherein

[0175] n is 0;

[0176] m is 1;

[0177] p is 1;

[0178] L3 is selected from

YKMYGSEMLHKRDPLDEDEDTDISYKKLKEEEMAD
CSRAARGTIGARRTGQPLKEDPSAVPVFSVDYGELDFQWREKTPEPPVPC
VPEQ
RIRQKKAQGSTSSTRLHEPEKNAREITQDTNDITYADLNLPKGKKPAPQA
AEPNNH
KTHRRKAARTAVGRNDTHPTTGSASPKHQKKSKLHGPTETSSCSGAAPTV
EMDEELHYASLNFHGMNPSKDTS
KCYFLRKAKAKQMPVEMSRPAVPLLNSNNEKMSDPNMEANSHYGHNDDVR
NHAMKPINDNKEPLNSDVQYTEVQVSSAESHKDLGKKDTE
RRHQGKQNELSDTAGREINLVDAHLKSEQTEASTRQNSQVLLSETGIYDN
DPDLCFRMQEGSEVYSNPCLEENKPGIVYASLNHSVIGPNSRLARNVKEA
P
WRMMKYQQKAAGMSPEQVLQPLEGDLCYADLTLQLAGTSPQKATTKLSSA
QVDQVEVEYVTMASLPKEDISYASLTLGAEDQEPTYCNMGHLSSHLPGRG
PEEP
WRRKRKEKQSETSPKEFLTIYEDVKDLKTRRNHEQEQTFPGGGSTIYSMI
SQSSAPTSQEPAYTLYSLIQPSRKSGSRKRNHSPSFNS
VRSCRKKSARPAAGVGDTGIEDANAVRGSASQGPLTEPWAEDSPPDQPPP
ASARSSVGEGELQYASLSFQMVKPWDSRGQEATD
NKCGRRNKFGINRPAVLAPEDGLAMSLHFMTLGGSSLSPTEGKGSGLQGH
IIENPQYFSDACVHHIKRRDIVLKWELGEGAFGKVFLAECHNLLPEQDKM
LVAVKALKEASESARQDFQREAELLTMLQHQHIVRFFGVCTEGRPLLMVF
EYMRHGDLNRFLRSHGPDAKLLAGGEDVAPGPLGLGQLLAVASQVAAGMV
YLAGLHFVHRDLATRNCLVGQGLVVKIGDFGMSRDIYS
KLARHSKFGMKGPASVISNDDDSASPLHHISNGSNTPSSSEGGPDAVIIG
MTKIPVIENPQYFGITNSQLKPDTFVQHIKRHNIVLKRELGEGAFGKVFL
AECYNLCPEQDKILVAVKTLKDASDNARKDFHREAELLTNLQHEHIVKFY
GVCVEGDPLIMVFEYMKHGDLNKFLRAHGPDAVLMAEGNPPTELTQSQML
HIAQQIAAGMVYLASQHFVHRDLATRNCLVGENLLVKIGDFGMSRDVYS
KRKGRCSVPAFCSSQAEAPADTPEPTAGHTLYSVLSQGYEKLDTPLRPAR
QQPTPTSDSSSDSNLTTEEDEDRPEVHKPISGRYEVFDQVTQEGAGHDPA
PEGQADYDPVTPYVTEVESVVGENTMYAQVFNLQGKTPVSQKEESSA
KRVQETKFGNAFTEEDSELVVNYIAKKSFCRRAIELTLHSLGVSEELQNK
LEDVVIDRNLLILGKILGEGEFGSVMEGNLKQEDGTSLKVAVKTMKLDNS
SQREIEEFLSEAACMKDFSHPNVIRLLGVCIEMSSQGIPKPMVILPFMKY
GDLHTYLLYSRLETGPKHIPLQTLLKFMVDIALGMEYLSNRNFLHRDLAA
RNCMLRDDMTVCVADFGLSKKIYSGDYYRQGRIAKMPVKWIAIESLADRV
YTSKSDVWAFGVTMWEIATRGM

and L4 comprises one sequence selected from the group consisting of (k)

RTQ
SRP
KIHR
CVRS
KAENIIMMETAQTSL
RKAVPDAVESRYSRTEGSLDGT
RKPQVVPPPQQNDLEIPESPTYENFT
GKSQPKAQNPARLSRKELENFDVYS
VFPSGMGTSSPARRGSADGPRSAQPLRPEDGHCSWPL
QTSPQPASEDTLTYADLDMVHLNRTPKQPAPKPEPSFSEYASVQVPRK
FNLQGKTPVSQKEESSATIYCSIRKPQVVPPPQQNDLEIPESPTYENFT
GGRTMLPIRWMPPESILYRKFTTESDVWSFGVVLWEIFTYGKQPWYQLSN
EAIDCITQGRELERPRACPPEVYAIMRGCWQREPQQRHSIKDVHARLQAL
AQAPPVYLDVLG
GGHTMLPIRWMPPESIMYRKFTTESDVWSLGVVLWEIFTYGKQPWYQLSN
NEVIECITQGRVLQRPRTCPQEVYELMLGCWQREPHMRKNIKGIHTLLQN
LAKASPVYLDILG
QNHEMYDYLLHGHRLKQPEDCLDELYEIMYSCWRTDPLDRPTFSVLRLQL
EKLLESLPDVRNQADVIYVNTQLLESSEGLAQGSTLAPLDLNIDPDSIIA
SCTPRAAISVVTAEVHDSKPHEGRYILNGGSEEWEDLTSAPSAAVTAEKN
SVLPGERLVRNGVSWSHSSMLPLGSSLPDELLFADDSSEGSEVLM
KDLKTRRNHEQEQTFPGGGSTIYSMIQSQSSAPTSQEPAYTLYSLIQPSR
KSGSRKRNHSPSFNSTIYEVIGKSQPKAQNPARLSRKELENFDVYS

[0179] and optionally
[0180] (I) a naturally occurring intracellular domain from a known inhibitory receptor such as any of the sequences shown in table 2 or a fragment thereof wherein said intracellular domain is C-terminally flanking to a sequence in (k) above;

[0181] and the ITSM is the sequence TX₁YX₂X₃X₄, wherein

[0182] X₁ is an amino acid,

[0183] X₂ is an amino acid,

[0184] X₃ is an amino acid, and,

[0185] X₄ is V or I,

[0186] or a variant thereof.

[0187] In some embodiments, the intracellular domain comprises the following sequence: ((L1-ITIM-L2)ⁿ-(L3-ITSM-L4)^{m})^{p}, wherein

[0188] n is 0;

[0189] m is 1;

[0190] p is 1;

[0191] L3 is selected from

CSRAARGTIGARRTGQPLKEDPSAVPVFSVDYGELDFQWREKTPEPPVPC
VPEQ
RIRQKKAQGSTSSTRLHEPEKNAREITQDTNDITYADLNLPKGKKPAPQA
AEPNNH
KCYFLRKAKAKQMPVEMSRPAVPLLNSNNEKMSDPNMEANSHYGHNDDVR
NHAMKPINDNKEPLNSDVQYTEVQVSSAESHKDLGKKDTE
RRHQGKQNELSDTAGREINLVDAHLKSEQTEASTRQNSQVLLSETGIYDN
DPDLCFRMQEGSEVYSNPCLEENKPGIVYASLNHSVIGPNSRLARNVKEA
P
WRMMKYQQKAAGMSPEQVLQPLEGDLCYADLTLQLAGTSPQKATTKLSSA
QVDQVEVEYVTMASLPKEDISYASLTLGAEDQEPTYCNMGHLSSHLPGRG
PEEP
WRRKRKEKQSETSPKEFLTIYEDVKDLKTRRNHEQEQTFPGGGSTIYSMI
QSQSSAPTSQEPAYTLYSLIQPSRKSGSRKRNHSPSFNS
VRSCRKKSARPAAGVGDTGIEDANAVRGSASQGPLTEPWAEDSPPDQPPP
SARSSVGEGELQYASLSFQMVKPWDSRGQEATD
KRKGRCSVPAFCSSQAEAPADTPEPTAGHTLYSVLSQGYEKLDTPLRPAR
QQPTPTSDSSSDSNLTTEEDEDRPEVHKPISGRYEVFDQVTQEGAGHDPA
PEGQADYDPVTPYVTEVESVVGENTMYAQVFNLQGKTPVSQKEESSA

[0192] L4 comprises one sequence selected from the group consisting of (k)

SRP
KIHR
CVRS
RKAVPDAVESRYSRTEGSLDGT
RKPQVVPPPQQNDLEIPESPTYENFT
GKSQPKAQNPARLSRKELENFDVYS
VFPSGMGTSSPARRGSADGPRSAQPLRPEDGHCSWPL
QTSPQPASEDTLTYADLDMVHLNRTPKQPAPKPEPSFSEYASVQVPRK

[0193] and optionally
[0194] (l) a naturally occurring intracellular domain from a known inhibitory receptor selected from the sequences shown in table 2 or a fragment thereof wherein said intracellular domain is C-terminally flanking to a sequence in (k) above;

[0195] and the ITSM is the sequence TX₁YX₂X₃X₄, wherein

[0196] X₁ is an amino acid,

[0197] X₂ is an amino acid,

[0198] X₃ is an amino acid, and,

[0199] X₄ is V or I,

[0200] or a variant thereof.

[0201] In some embodiments, the intracellular domain comprises the following sequence: ((L1-ITIM-L2)ⁿ-(L3-ITSM-L4)^{m})^{p}, wherein

[0202] n is 0;

[0203] m is 1;

[0204] p is 1;

[0205] L3 is selected from

CSRAARGTIGARRTGQPLKEDPSAVPVFSVDYGELDFQWREKTPEPPVPC
VPEQ

and L4 comprises

[0206] (k)

VFPSGMGTSSPARRGSADGPRSAQPLRPEDGHCSWPL

[0207] and
[0208] (l) a naturally occurring intracellular domain from a known inhibitory receptor selected from the sequences shown in table 2 or a fragment thereof wherein said intracellular domain is C-terminally flanking to a sequence in (k) above;
   and the ITSM is the sequence TX₁YX₂X₃X₄, wherein

[0209] X₁ is an amino acid,

[0210] X₂ is an amino acid,

[0211] X₃ is an amino acid, and,

[0212] X₄ is V or I,

[0213] or a variant thereof.

[0214] In some embodiments, the intracellular domain comprises the following sequence: ((L1-ITIM-L2)ⁿ-(L3-ITSM-L4)^{m})^{p}, wherein

[0215] n is 0;

[0216] m is 1;

[0217] p is 1;

[0218] L3 is selected from

WRMMKYQQKAAGMSPEQVLQPLEGDLCYADLTLQLAGTSPQKATTKLSSA
QVDQVEVEYVTMASLPKEDISYASLTLGAEDQEPTYCNMGHLSSHLPGRG
PEEP

[0219] L4 comprises

[0220] (k)

SRP

[0221] and optionally
[0222] (l) a naturally occurring intracellular domain from a known inhibitory receptor selected from the sequences shown in table 2 or a fragment thereof wherein said intracellular domain is C-terminally flanking to a sequence in (k) above;

[0223] and the ITSM is the sequence TX₁₁YX₂X₃X₄, wherein

[0224] X₁ is an amino acid,

[0225] X₂ is an amino acid,

[0226] X₃ is an amino acid, and,

[0227] X₄ is V or I,

[0228] or a variant thereof.

[0229] In some embodiments, the intracellular domain comprises the following sequence: ((L1-ITIM-L2)ⁿ-(L3-ITSM-L4)^{m})^{p}, wherein

[0230] n is 0;

[0231] m is 1;

[0232] p is 1 or 2;

[0233] L3 comprises one sequence selected from
[0234] (i) a non-naturally occurring sequence comprising between 1 and 500 amino acids; and

[0235] L4 comprises one or more, preferably one or two, sequences selected from:
[0236] (m) a non-naturally occurring sequence comprising between 1 and 500 amino acids, and, wherein,

[0237] the ITSM is the sequence TX₁YX₂X₃X₄, wherein

[0238] X₁ is an amino acid,

[0239] X₂ is an amino acid,

[0240] X₃ is an amino acid, and,

[0241] X₄ is V or I.

[0242] In some embodiments, the intracellular domain comprises the sequence (L1-ITIM-L2-L3-ITSM-L4)^{p} wherein

[0243] p is 1, 2, 3, 4 or 5;

[0244] L1 is a naturally occurring N-terminal flanking region of an ITIM only intracellular domain or a fragment thereof such as, for example, any of the sequences shown in Table 3 below or a fragment thereof;

[0245] L2 is absent;

[0246] L3 is a naturally occurring intracellular domain between ITIM and ITSM from proteins that have ITIM.*ITSM motif or a fragment thereof such as, for example, any of the sequences shown in Table 5 below or a fragment thereof;

[0247] L4 is a naturally occurring C-terminal flanking region of an ITIM.*ITSM intracellular domain or a fragment thereof such as, for example, any of the sequences shown in Table 7 below or a fragment thereof; or a naturally occurring C-terminal flanking region of ITSM only intracellular domain or a fragment thereof such as, for example, any of the sequences shown in Table 8 below or a fragment thereof.

[0248] In some embodiments, the intracellular domain comprises the sequence (L1-ITIM-L2-L3-ITSM-L4)^{p} wherein

[0249] p is 1, 2, 3, 4 or 5;

[0250] L1 is a naturally occurring N-terminal flanking region of ITIM only intracellular domains selected from the following sequences;

YKMYGSEMLHKRDPLDEDEDTD
DHWALTQRTARAVSPQSTKPMAES
CSRAARGTIGARRTGQPLKEDPSAVPVFS
HRQNQIKQGPPRSKDEEQKPQQRPDLAVDVLERTADKATVNGLPEKDRET
DTSALAAGSSQE
KTHRRKAARTAVGRNDTHPTTGSASPKHQKKSKLHGPTETSSCSGAAPTV
EMDEE
LTRKKKALRIHSVEGDLRRKSAGQEEWSPSAPSPPGSCVQAEAAPAGLCG
EQRGEDCAELHDYFNV
KCYFLRKAKAKQMPVEMSRPAVPLLNSNNEKMSDPNMEANSHYGHNDDVR
NHAMKPINDNKEPLNSD
RRHQGKQNELSDTAGREINLVDAHLKSEQTEASTRQNSQVLLSETGIYDN
DPDLCFRMQEGSEVYSNPCLEENKPG
WRMMKYQQKAAGMSPEQVLQPLEGDLCYADLTLQLAGTSPQKATTKLSSA
QVDQVEVEYVTMASLPKED
KRVQETKFGNAFTEEDSELVVNYIAKKSFCRRAIELTLHSLGVSEELQNK
LEDVVIDRNLLILGKILGEGEFGSVMEGNLKQEDGTSLKVAVKTMKLDNS
SQREIEEFLSEAACMKDFSHPNVIRLLGVCIEMSSQGIPKPMVILPFMKY
GDLHTY

[0251] L2 is absent;

[0252] L3 is a naturally occurring intracellular domain between ITIM and ITSM from proteins that have ITIM.*ITSM motif selected from the following sequences:

KEEEMAD
NFHGMNPSKDTS
QVSSAESHKDLGKKDTE
NLPKGKKPAPQAAEPNNH
NHSVIGPNSRLARNVKEAP
DFQWREKTPEPPVPCVPEQ
TLQLAGTSPQKATTKLSSAQVDQVEVEYVTMASLPKEDISYASLTLGAED
QEPTYCNMGHLSSHLPGRGPEEP
ETGPKHIPLQTLLKFMVDIALGMEYLSNRNFLHRDLAARNCMLRDDMTVC
VADFGLSKKIYSGDYYRQGRIAKMPVKWIAIESLADRVYTSKSDVWAFGV
TMWEIATRGM

[0253] L4 is a naturally occurring C-terminal flanking region of ITIM.*ITSM intracellular domains selected from the following sequences:

SRP
RTQ
CVRS
KAENIIMMETAQTSL
RKAVPDAVESRYSRTEGSLDGT
VFPSGMGTSSPARRGSADGPRSAQPLRPEDGHCSWPL
QTSPQPASEDTLTYADLDMVHLNRTPKQPAPKPEPSFSEYASVQVPRK
QNHEMYDYLLHGHRLKQPEDCLDELYEIMYSCWRTDPLDRPTFSVLRLQL
EKLLESLPDVRNQADVIYVNTQLLESSEGLAQGSTLAPLDLNIDPDSIIA
SCTPRAAISVVTAEVHDSKPHEGRYILNGGSEEWEDLTSAPSAAVTAEKN
SVLPGERLVRNGVSWSHSSMLPLGSSLPDELLFADDSSEGSEVLM

[0254] or a naturally occurring C-terminal flanking region of ITSM only intracellular domains selected from the following sequences:

RTQ
SRP
CVRS
KAENIIMMETAQTSL
RKAVPDAVESRYSRTEGSLDGT
VFPSGMGTSSPARRGSADGPRSAQPLRPEDGHCSWPL
QTSPQPASEDTLTYADLDMVHLNRTPKQPAPKPEPSFSEYASVQVPRK
FNLQGKTPVSQKEESSATIYCSIRKPQVVPPPQQNDLEIPESPTYENFT
GGRTMLPIRWMPPESILYRKFTTESDVWSFGVVLWEIFTYGKQPWYQLSN
TEAIDCITQGRELERPRACPPEVYAIMRGCWQREPQQRHSIKDVHARLQA
LAQAPPVYLDVLG
GGHTMLPIRWMPPESIMYRKFTTESDVWSLGVVLWEIFTYGKQPWYQLSN
NEVIECITQGRVLQRPRTCPQEVYELMLGCWQREPHMRKNIKGIHTLLQN
LAKASPVYLDILG
QNHEMYDYLLHGHRLKQPEDCLDELYEIMYSCWRTDPLDRPTFSVLRLQL
EKLLESLPDVRNQADVIYVNTQLLESSEGLAQGSTLAPLDLNIDPDSIIA
SCTPRAAISVVTAEVHDSKPHEGRYILNGGSEEWEDLTSAPSAAVTAEKN
SVLPGERLVRNGVSWSHSSMLPLGSSLPDELLFADDSSEGSEVLM
KDLKTRRNHEQEQTFPGGGSTIYSMIQSQSSAPTSQEPAYTLYSLIQPSR
KSGSRKRNHSPSFNSTIYEVIGKSQPKAQNPARLSRKELENFDVYS.

or a variant thereof.

[0255] In some embodiments, the non-naturally occurring sequence of (d), (i) and (m) comprises between 1 and 500 amino acids, preferably 1 to 400, 1 to 300, 1 to 200, 1 to 100, 10 to 100, 10 to 80, 10 to 60, 10 to 40, 100 to 200, 100 to 300 or 100 to 400.

[0256] In some embodiments, the non-naturally occurring sequence of (d) or (i) is a Glycine/Serine linker (GlyₓSer)ₙ where x=1, 2, 3, 4 or 5 and n is 1 to 100. Preferably the Glycine/Serine linker comprises the amino acid sequence (Gly-Gly-Gly-Ser)ₙ or (Gly-Gly-Gly-Gly-Ser)ₙ, where n is a positive integer equal to or greater than 1, preferably between 1 to 100, 1 to 80, 1 to 50, 1 to 20 or 1 to 10. For example, n=1, n=2, n=3, n=4, n=5, n=6, n=7, n=8, n=9 and n=10. In one embodiment, the glycine/serine linkers include, but are not limited to, (Gly₄Ser)₄ or (Gly₄Ser)₃.

[0257] In some embodiments, X₁ is E, V or I.

[0258] In some embodiments, X₁ is E.

[0259] In some embodiments, X₂ is S or A.

[0260] In some embodiments, X₂ is A.

[0261] In some embodiments, X₃ is E, S, T, Q or V.

[0262] In some embodiments, X₃ is E.

[0263] In some embodiments, X₃ is T.

[0264] In some embodiments, X₂ is I.

[0265] In some embodiments, X₅ is L, V or I.

[0266] In some embodiments, X₅ is L.

[0267] In some embodiments, X₅ is V.

[0268] In some embodiments, X₅ is I.

[0269] In some embodiments, X₆ is A, H, Q, T, D, V, L or E.

[0270] In some embodiments, X₆ is H.

[0271] In some embodiments, X₆ is D.

[0272] In some embodiments, X₇ is A, G, T, V or E.

[0273] In some embodiments, X₇ is A.

[0274] In some embodiments, X₇ is G.

[0275] In some embodiments, X₈ is V, S, D or E.

[0276] In some embodiments, X₈ is S or E.

[0277] In some embodiments, X₈ is E.

[0278] In some embodiments, X₉ is L or V.

[0279] In some embodiments, X₉ is L.

[0280] In some embodiments, X₅ is L or V, X₈ is E and X₉ is L.

[0281] In some embodiments, the ITSM, or at least one of the ITSMs when several ITSMs are present in the intracellular domain, is selected from SEQ ID No 926 to SEQ ID No 1015 (see below table).

| | |
|---|---|
| TAYELV | SEQ ID No 926 |
| TAYGLI | SEQ ID No 927 |
| TAYNAV | SEQ ID No 928 |
| TCYGLV | SEQ ID No 929 |
| TCYPDI | SEQ ID No 930 |
| TDYASI | SEQ ID No 931 |
| TDYDLV | SEQ ID No 932 |
| TDYLSI | SEQ ID No 933 |
| TDYQQV | SEQ ID No 934 |
| TDYYRV | SEQ ID No 935 |
| TEYASI | SEQ ID No 936 |
| TEYATI | SEQ ID No 937 |
| TEYDTI | SEQ ID No 938 |
| TEYPLV | SEQ ID No 939 |
| TEYSEI | SEQ ID No 940 |
| TEYSEV | SEQ ID No 941 |
| TEYSTI | SEQ ID No 942 |
| TEYTKV | SEQ ID No 943 |
| TFYHVV | SEQ ID No 944 |
| TFYLLI | SEQ ID No 945 |
| TFYNKI | SEQ ID No 946 |
| TFYPDI | SEQ ID No 947 |
| TGYEDV | SEQ ID No 948 |
| TGYLSI | SEQ ID No 949 |
| THYKEI | SEQ ID No 950 |
| TIYAQV | SEQ ID No 951 |
| TIYAVV | SEQ ID No 952 |
| TIYCSI | SEQ ID No 953 |
| TIYEDV | SEQ ID No 954 |
| TIYERI | SEQ ID No 955 |
| TAYELV | SEQ ID No 86 |
| TIYEVI | SEQ ID No 956 |
| TIYHVI | SEQ ID No 957 |
| TIYIGV | SEQ ID No 958 |
| TIYLKV | SEQ ID No 959 |
| TIYSMI | SEQ ID No 960 |
| TIYSTI | SEQ ID No 961 |
| TIYTYI | SEQ ID No 962 |
| TKYFHI | SEQ ID No 963 |
| TKYMEI | SEQ ID No 964 |
| TKYQSV | SEQ ID No 965 |
| TKYSNI | SEQ ID No 966 |
| TKYSTV | SEQ ID No 967 |
| TLYASV | SEQ ID No 968 |
| TLYAVV | SEQ ID No 969 |
| TLYFWV | SEQ ID No 970 |
| TLYHLV | SEQ ID No 971 |
| TLYPMV | SEQ ID No 972 |
| TLYPPI | SEQ ID No 973 |
| TLYRDI | SEQ ID No 974 |
| TLYRDV | SEQ ID No 975 |
| TLYSKI | SEQ ID No 976 |
| TLYSLI | SEQ ID No 977 |
| TLYSPV | SEQ ID No 978 |
| TMYAQV | SEQ ID No 979 |
| TMYCQV | SEQ ID No 980 |
| TNYKAV | SEQ ID No 981 |
| TNYNLV | SEQ ID No 982 |
| TPYAGI | SEQ ID No 983 |
| TPYPGV | SEQ ID No 984 |
| TPYVDI | SEQ ID No 985 |
| TAYELV | SEQ ID No 86 |
| TQYGRV | SEQ ID No 986 |
| TQYNQV | SEQ ID No 987 |
| TRYAYV | SEQ ID No 988 |
| TRYGEV | SEQ ID No 989 |
| TRYHSV | SEQ ID No 990 |
| TRYKTI | SEQ ID No 991 |
| TRYLAI | SEQ ID No 992 |
| TRYMAI | SEQ ID No 993 |
| TRYQKI | SEQ ID No 994 |
| TRYQQI | SEQ ID No 995 |
| TRYSNI | SEQ ID No 996 |
| TRYSPI | SEQ ID No 997 |
| TSYGTV | SEQ ID No 998 |
| TSYMEV | SEQ ID No 999 |
| TSYQGV | SEQ ID No 1000 |
| TSYTTI | SEQ ID No 1001 |
| TTYRSI | SEQ ID No 1002 |
| TTYSDV | SEQ ID No 1003 |
| TTYVTI | SEQ ID No 1004 |
| TVYAQI | SEQ ID No 1005 |
| TVYASV | SEQ ID No 1006 |
| TVYEVI | SEQ ID No 1007 |
| TVYGDV | SEQ ID No 1008 |
| TVYKGI | SEQ ID No 1009 |
| TVYQRV | SEQ ID No 1010 |
| TVYSEV | SEQ ID No 1011 |
| TVYSTV | SEQ ID No 1012 |
| TYYHSI | SEQ ID No 1013 |
| TYYLQI | SEQ ID No 1014 |
| TYYYSV | SEQ ID No 1015 |
| TAYELV | SEQ ID No 86 |

[0282] In some embodiments, the ITSM, or at least one of the ITSMs when several ITSMs are present in the intracellular domain is TEYASI.

[0283] In some embodiments, the ITSM, or at least one of the ITSMs when several ITSMs are present in the intracellular domain is TEYSEI.

[0284] In some embodiments, the ITSM, or at least one of the ITSMs when several ITSMs are present in the intracellular domain is TVYSEV.

[0285] In some embodiments, the ITSM, or at least one of the ITSMs when several ITSMs are present in the intracellular domain is TEYSTI.

[0286] In some embodiments, the ITIM, or at least one of the ITIMs when several ITIMs are present in the intracellular domain is selected from SEQ ID No 1016 to SEQ ID 1998 (see below table).

| | |
|---|---|
| LLYEMV | SEQ ID No 1016 |
| ITYFAL | SEQ ID No 1017 |
| ISYKGL | SEQ ID No 1018 |
| LAYHTV | SEQ ID No 1019 |
| VQYLRL | SEQ ID No 1020 |
| LTYVLL | SEQ ID No 1021 |
| VRYSIV | SEQ ID No 1022 |
| LLYLLL | SEQ ID No 1023 |
| IAYGDI | SEQ ID No 1024 |
| IAYRDL | SEQ ID No 1025 |
| IAYSLL | SEQ ID No 1026 |
| IAYSRL | SEQ ID No 1027 |
| ICYALL | SEQ ID No 1028 |
| ICYDAL | SEQ ID No 1029 |
| ICYPLL | SEQ ID No 1030 |
| ICYQLI | SEQ ID No 1031 |
| IDYILV | SEQ ID No 1032 |
| IDYKTL | SEQ ID No 1033 |
| IDYTQL | SEQ ID No 1034 |
| IDYYNL | SEQ ID No 1035 |
| IEYCKL | SEQ ID No 1036 |
| IEYDQI | SEQ ID No 1037 |
| IEYGPL | SEQ ID No 1038 |
| IEYIRV | SEQ ID No 1039 |
| IEYKSL | SEQ ID No 1040 |
| IEYKTL | SEQ ID No 1041 |
| IEYSVL | SEQ ID No 1042 |
| IEYWGI | SEQ ID No 1043 |
| IFYGNV | SEQ ID No 1044 |
| IFYHNL | SEQ ID No 1045 |
| IFYKDI | SEQ ID No 1046 |
| IFYQNV | SEQ ID No 1047 |
| IFYRLI | SEQ ID No 1048 |
| IGYDIL | SEQ ID No 1049 |
| IGYDVL | SEQ ID No 1050 |
| IGYICL | SEQ ID No 1051 |
| IGYKAI | SEQ ID No 1052 |
| IGYLEL | SEQ ID No 1053 |
| IGYLPL | SEQ ID No 1054 |
| IGYLRL | SEQ ID No 1055 |
| IGYPFL | SEQ ID No 1056 |
| IGYSDL | SEQ ID No 1057 |
| IHYRQI | SEQ ID No 1058 |
| IHYSEL | SEQ ID No 1059 |
| IIYAFL | SEQ ID No 1060 |
| IIYHVI | SEQ ID No 1061 |
| IIYMFL | SEQ ID No 1062 |
| IIYNLL | SEQ ID No 1063 |
| IIYNNL | SEQ ID No 1064 |
| IIYSEV | SEQ ID No 1065 |
| IKYCLV | SEQ ID No 1066 |
| IKYKEL | SEQ ID No 1067 |
| IKYLAL | SEQ ID No 1068 |
| IKYTCI | SEQ ID No 1069 |
| ILYADI | SEQ ID No 1070 |
| ILYAFL | SEQ ID No 1071 |
| ILYCSV | SEQ ID No 1072 |
| ILYEGL | SEQ ID No 1073 |
| ILYELL | SEQ ID No 1074 |
| ILYFQI | SEQ ID No 1075 |
| ILYHTV | SEQ ID No 1076 |
| ILYLQV | SEQ ID No 1077 |
| ILYSIL | SEQ ID No 1078 |
| ILYSVL | SEQ ID No 1079 |
| ILYTEL | SEQ ID No 1080 |
| ILYTIL | SEQ ID No 1081 |
| IMYTLV | SEQ ID No 1082 |
| INYCSV | SEQ ID No 1083 |
| INYKDI | SEQ ID No 1084 |
| INYTTV | SEQ ID No 1085 |
| INYVLL | SEQ ID No 1086 |
| IPYDVL | SEQ ID No 1087 |
| IPYLLV | SEQ ID No 1088 |
| IPYRTV | SEQ ID No 1089 |
| IPYSQL | SEQ ID No 1090 |
| IPYSRI | SEQ ID No 1091 |
| IPYTQI | SEQ ID No 1092 |
| IQYAPL | SEQ ID No 1093 |
| IQYASL | SEQ ID No 1094 |
| IQYERL | SEQ ID No 1095 |
| IQYGII | SEQ ID No 1096 |
| IQYGNV | SEQ ID No 1097 |
| IQYGRV | SEQ ID No 1098 |
| IQYNVV | SEQ ID No 1099 |
| IQYRSI | SEQ ID No 1100 |
| IQYTEL | SEQ ID No 1101 |
| IQYWGI | SEQ ID No 1102 |
| IRYANL | SEQ ID No 1103 |
| IRYLDL | SEQ ID No 1104 |
| IRYPLL | SEQ ID No 1105 |
| IRYRLL | SEQ ID No 1106 |
| IRYRTI | SEQ ID No 1107 |
| ISYASL | SEQ ID No 1108 |
| ISYCGV | SEQ ID No 1109 |
| ISYEPI | SEQ ID No 1110 |
| ISYFQI | SEQ ID No 1111 |
| ISYGLI | SEQ ID No 1112 |
| ISYKKL | SEQ ID No 1113 |
| ISYLPL | SEQ ID No 1114 |
| ISYPML | SEQ ID No 1115 |
| ISYTTL | SEQ ID No 1116 |
| ITYAAV | SEQ ID No 1117 |
| ITYADL | SEQ ID No 1118 |
| ITYAEL | SEQ ID No 1119 |
| ITYAEV | SEQ ID No 1120 |
| ITYASV | SEQ ID No 1121 |
| ITYDLI | SEQ ID No 1122 |
| ITYENV | SEQ ID No 1123 |
| ITYQLL | SEQ ID No 1124 |
| ITYSLL | SEQ ID No 1125 |
| IVYAEL | SEQ ID No 1126 |
| IVYALV | SEQ ID No 1127 |
| IVYASL | SEQ ID No 1128 |
| IVYEIL | SEQ ID No 1129 |
| IVYFIL | SEQ ID No 1130 |
| IVYHML | SEQ ID No 1131 |
| IVYLCI | SEQ ID No 1132 |
| IVYRLL | SEQ ID No 1133 |
| IVYSAL | SEQ ID No 1134 |
| IVYSWV | SEQ ID No 1135 |
| IVYTEL | SEQ ID No 1136 |
| IVYYIL | SEQ ID No 1137 |
| IWYENL | SEQ ID No 1138 |
| IWYFVV | SEQ ID No 1139 |
| IWYNIL | SEQ ID No 1140 |
| IYYLGV | SEQ ID No 1141 |
| LAYALL | SEQ ID No 1142 |
| LAYARI | SEQ ID No 1143 |
| LAYDSV | SEQ ID No 1144 |
| LAYFGV | SEQ ID No 1145 |
| LAYHRL | SEQ ID No 1146 |
| LAYKDL | SEQ ID No 1147 |
| LAYKRI | SEQ ID No 1148 |
| LAYPPL | SEQ ID No 1149 |
| LAYQTL | SEQ ID No 1150 |
| LAYREV | SEQ ID No 1151 |
| LAYRII | SEQ ID No 1152 |
| LAYRLL | SEQ ID No 1153 |
| LAYSQL | SEQ ID No 1154 |
| LAYSSV | SEQ ID No 1155 |
| LAYTLL | SEQ ID No 1156 |
| LAYWGI | SEQ ID No 1157 |
| LAYYTV | SEQ ID No 1158 |
| LCYADL | SEQ ID No 1159 |
| LCYAIL | SEQ ID No 1160 |
| LCYFHL | SEQ ID No 1161 |
| LCYHPI | SEQ ID No 1162 |
| LCYKEI | SEQ ID No 1163 |
| LCYKFL | SEQ ID No 1164 |
| LCYMII | SEQ ID No 1165 |
| LCYRKI | SEQ ID No 1166 |
| LCYRVL | SEQ ID No 1167 |
| LCYSTV | SEQ ID No 1168 |
| LCYTLV | SEQ ID No 1169 |
| LDYASI | SEQ ID No 1170 |
| LDYCEL | SEQ ID No 1171 |
| LDYDKI | SEQ ID No 1172 |
| LDYDKL | SEQ ID No 1173 |
| LDYDYL | SEQ ID No 1174 |
| LDYDYV | SEQ ID No 1175 |
| LDYEFL | SEQ ID No 1176 |
| LDYINV | SEQ ID No 1177 |
| LDYNNL | SEQ ID No 1178 |
| LDYPHV | SEQ ID No 1179 |
| LDYSPV | SEQ ID No 1180 |
| LDYVEI | SEQ ID No 1181 |
| LDYWGI | SEQ ID No 1182 |
| LEYAPV | SEQ ID No 1183 |
| LEYIPL | SEQ ID No 1184 |
| LEYKTI | SEQ ID No 1185 |
| LEYLCL | SEQ ID No 1186 |
| LEYLKL | SEQ ID No 1187 |
| LEYLQI | SEQ ID No 1188 |
| LEYLQL | SEQ ID No 1189 |
| LEYQRL | SEQ ID No 1190 |
| LEYVDL | SEQ ID No 1191 |
| LEYVSV | SEQ ID No 1192 |
| LEYYQI | SEQ ID No 1193 |
| LFYAQL | SEQ ID No 1194 |
| LFYCSV | SEQ ID No 1195 |
| LFYERV | SEQ ID No 1196 |
| LFYGFL | SEQ ID No 1197 |
| LFYKYV | SEQ ID No 1198 |
| LFYLLL | SEQ ID No 1199 |
| LFYNKV | SEQ ID No 1200 |
| LFYRHL | SEQ ID No 1201 |
| LFYTLL | SEQ ID No 1202 |
| LFYWDV | SEQ ID No 1203 |
| LFYWKL | SEQ ID No 1204 |
| LGYGNV | SEQ ID No 1205 |
| LGYKEL | SEQ ID No 1206 |
| LGYLQL | SEQ ID No 1207 |
| LGYPLI | SEQ ID No 1208 |
| LGYPWV | SEQ ID No 1209 |
| LGYSAL | SEQ ID No 1210 |
| LGYSDL | SEQ ID No 1211 |
| LGYVTL | SEQ ID No 1212 |
| LHYAKI | SEQ ID No 1213 |
| LHYALV | SEQ ID No 1214 |
| LHYANL | SEQ ID No 1215 |
| LHYARL | SEQ ID No 1216 |
| LHYASI | SEQ ID No 1217 |
| LHYASL | SEQ ID No 1218 |
| LHYASV | SEQ ID No 1219 |
| LHYATI | SEQ ID No 1220 |
| LHYATL | SEQ ID No 1221 |
| LHYAVL | SEQ ID No 1222 |
| LHYDVV | SEQ ID No 1223 |
| LHYEGL | SEQ ID No 1224 |
| LHYETI | SEQ ID No 1225 |
| LHYFEI | SEQ ID No 1226 |
| LHYFVV | SEQ ID No 1227 |
| LHYGAI | SEQ ID No 1228 |
| LHYILI | SEQ ID No 1229 |
| LHYINL | SEQ ID No 1230 |
| LHYKRI | SEQ ID No 1231 |
| LHYLDL | SEQ ID No 1232 |
| LHYLNI | SEQ ID No 1233 |
| LHYLTI | SEQ ID No 1234 |
| LHYLVI | SEQ ID No 1235 |
| LHYMAI | SEQ ID No 1236 |
| LHYMII | SEQ ID No 1237 |
| LHYMNI | SEQ ID No 1238 |
| LHYMTI | SEQ ID No 1239 |
| LHYMTL | SEQ ID No 1240 |
| LHYMTV | SEQ ID No 1241 |
| LHYMVI | SEQ ID No 1242 |
| LHYNML | SEQ ID No 1243 |
| LHYPAL | SEQ ID No 1244 |
| LHYPDL | SEQ ID No 1245 |
| LHYPII | SEQ ID No 1246 |
| LHYPIL | SEQ ID No 1247 |
| LHYPLL | SEQ ID No 1248 |
| LHYPML | SEQ ID No 1249 |
| LHYPNV | SEQ ID No 1250 |
| LHYPSI | SEQ ID No 1251 |
| LHYPTI | SEQ ID No 1252 |
| LHYPTL | SEQ ID No 1253 |
| LHYPTV | SEQ ID No 1254 |
| LHYPVI | SEQ ID No 1255 |
| LHYPVL | SEQ ID No 1256 |
| LHYRII | SEQ ID No 1257 |
| LHYRTI | SEQ ID No 1258 |
| LHYSII | SEQ ID No 1259 |
| LHYSSI | SEQ ID No 1260 |
| LHYSTI | SEQ ID No 1261 |
| LHYSTL | SEQ ID No 1262 |
| LHYSVI | SEQ ID No 1263 |
| LHYTAI | SEQ ID No 1264 |
| LHYTAL | SEQ ID No 1265 |
| LHYTII | SEQ ID No 1266 |
| LHYTKV | SEQ ID No 1267 |
| LHYTLI | SEQ ID No 1268 |
| LHYTSI | SEQ ID No 1269 |
| LHYTTI | SEQ ID No 1270 |
| LHYTTV | SEQ ID No 1271 |
| LHYTVI | SEQ ID No 1272 |
| LHYTVL | SEQ ID No 1273 |
| LHYTVV | SEQ ID No 1274 |
| LHYVSI | SEQ ID No 1275 |
| LHYVTI | SEQ ID No 1276 |
| LHYVVI | SEQ ID No 1277 |
| LIYEKL | SEQ ID No 1278 |
| LIYENV | SEQ ID No 1279 |
| LIYKDL | SEQ ID No 1280 |
| LIYNSL | SEQ ID No 1281 |
| LIYSGL | SEQ ID No 1282 |
| LIYTLL | SEQ ID No 1283 |
| LIYTVL | SEQ ID No 1284 |
| LIYWEI | SEQ ID No 1285 |
| LKYCEL | SEQ ID No 1286 |
| LKYDKL | SEQ ID No 1287 |
| LKYESL | SEQ ID No 1288 |
| LKYFTI | SEQ ID No 1289 |
| LKYHTV | SEQ ID No 1290 |
| LKYILL | SEQ ID No 1291 |
| LKYIPI | SEQ ID No 1292 |
| LKYKHV | SEQ ID No 1293 |
| LKYLYL | SEQ ID No 1294 |
| LKYMEV | SEQ ID No 1295 |
| LKYMTL | SEQ ID No 1296 |
| LKYPAI | SEQ ID No 1297 |
| LKYPDV | SEQ ID No 1298 |
| LKYPEL | SEQ ID No 1299 |
| LKYQPI | SEQ ID No 1300 |
| LKYRGL | SEQ ID No 1301 |
| LKYRLL | SEQ ID No 1302 |
| LLYADL | SEQ ID No 1303 |
| LLYAPL | SEQ ID No 1304 |
| LLYAVV | SEQ ID No 1305 |
| LLYCAI | SEQ ID No 1306 |
| LLYEHV | SEQ ID No 1307 |
| LLYELL | SEQ ID No 1308 |
| LLYEQL | SEQ ID No 1309 |
| LLYGQI | SEQ ID No 1310 |
| LLYIRL | SEQ ID No 1311 |
| LLYKAL | SEQ ID No 1312 |
| LLYKFL | SEQ ID No 1313 |
| LLYKLL | SEQ ID No 1314 |
| LLYKTV | SEQ ID No 1315 |
| LLYMVV | SEQ ID No 1316 |
| LLYNAI | SEQ ID No 1317 |
| LLYNIV | SEQ ID No 1318 |
| LLYNVI | SEQ ID No 1319 |
| LLYPAI | SEQ ID No 1320 |
| LLYPLI | SEQ ID No 1321 |
| LLYPNI | SEQ ID No 1322 |
| LLYPSL | SEQ ID No 1323 |
| LLYPTI | SEQ ID No 1324 |
| LLYPVI | SEQ ID No 1325 |
| LLYPVV | SEQ ID No 1326 |
| LLYQIL | SEQ ID No 1327 |
| LLYQNI | SEQ ID No 1328 |
| LLYRLL | SEQ ID No 1329 |
| LLYRVI | SEQ ID No 1330 |
| LLYSII | SEQ ID No 1331 |
| LLYSLI | SEQ ID No 1332 |
| LLYSPV | SEQ ID No 1333 |
| LLYSRL | SEQ ID No 1334 |
| LLYSTI | SEQ ID No 1335 |
| LLYSVI | SEQ ID No 1336 |
| LLYSVV | SEQ ID No 1337 |
| LLYTTI | SEQ ID No 1338 |
| LLYTVI | SEQ ID No 1339 |
| LLYTVV | SEQ ID No 1340 |
| LLYVII | SEQ ID No 1341 |
| LLYVIL | SEQ ID No 1342 |
| LLYVTI | SEQ ID No 1343 |
| LLYWGI | SEQ ID No 1344 |
| LLYYLL | SEQ ID No 1345 |
| LLYYVI | SEQ ID No 1346 |
| LMYDNV | SEQ ID No 1347 |
| LMYMVV | SEQ ID No 1348 |
| LMYQEL | SEQ ID No 1349 |
| LMYRGI | SEQ ID No 1350 |
| LNYACL | SEQ ID No 1351 |
| LNYATI | SEQ ID No 1352 |
| LNYEVI | SEQ ID No 1353 |
| LNYGDL | SEQ ID No 1354 |
| LNYHKL | SEQ ID No 1355 |
| LNYMVL | SEQ ID No 1356 |
| LNYNIV | SEQ ID No 1357 |
| LNYPVI | SEQ ID No 1358 |
| LNYQMI | SEQ ID No 1359 |
| LNYSGV | SEQ ID No 1360 |
| LNYSVI | SEQ ID No 1361 |
| LNYTIL | SEQ ID No 1362 |
| LNYTTI | SEQ ID No 1363 |
| LNYVPI | SEQ ID No 1364 |
| LPYADL | SEQ ID No 1365 |
| LPYALL | SEQ ID No 1366 |
| LPYFNI | SEQ ID No 1367 |
| LPYFNV | SEQ ID No 1368 |
| LPYHDL | SEQ ID No 1369 |
| LPYKLI | SEQ ID No 1370 |
| LPYKTL | SEQ ID No 1371 |
| LPYLGV | SEQ ID No 1372 |
| LPYLKV | SEQ ID No 1373 |
| LPYPAL | SEQ ID No 1374 |
| LPYQVV | SEQ ID No 1375 |
| LPYRTV | SEQ ID No 1376 |
| LPYVEI | SEQ ID No 1377 |
| LPYYDL | SEQ ID No 1378 |
| LQYASL | SEQ ID No 1379 |
| LQYERI | SEQ ID No 1380 |
| LQYFAV | SEQ ID No 1381 |
| LQYFSI | SEQ ID No 1382 |
| LQYHNI | SEQ ID No 1383 |
| LQYIGL | SEQ ID No 1384 |
| LQYIKI | SEQ ID No 1385 |
| LQYLSL | SEQ ID No 1386 |
| LQYMIV | SEQ ID No 1387 |
| LQYPAI | SEQ ID No 1388 |
| LQYPLL | SEQ ID No 1389 |
| LQYPLV | SEQ ID No 1390 |
| LQYPSI | SEQ ID No 1391 |
| LQYPTL | SEQ ID No 1392 |
| LQYPVL | SEQ ID No 1393 |
| LQYRAV | SEQ ID No 1394 |
| LQYSAI | SEQ ID No 1395 |
| LQYSSI | SEQ ID No 1396 |
| LQYSVI | SEQ ID No 1397 |
| LQYTIL | SEQ ID No 1398 |
| LQYTLI | SEQ ID No 1399 |
| LQYTMI | SEQ ID No 1400 |
| LQYYQV | SEQ ID No 1401 |
| LRYAAV | SEQ ID No 1402 |
| LRYAGL | SEQ ID No 1403 |
| LRYAPL | SEQ ID No 1404 |
| LRYASI | SEQ ID No 1405 |
| LRYATI | SEQ ID No 1406 |
| LRYATV | SEQ ID No 1407 |
| LRYAVL | SEQ ID No 1408 |
| LRYCGI | SEQ ID No 1409 |
| LRYELL | SEQ ID No 1410 |
| LRYETL | SEQ ID No 1411 |
| LRYGAL | SEQ ID No 1412 |
| LRYGPI | SEQ ID No 1413 |
| LRYGTL | SEQ ID No 1414 |
| LRYHHI | SEQ ID No 1415 |
| LRYHSI | SEQ ID No 1416 |
| LRYHVL | SEQ ID No 1417 |
| LRYIAI | SEQ ID No 1418 |
| LRYIFV | SEQ ID No 1419 |
| LRYITV | SEQ ID No 1420 |
| LRYKEV | SEQ ID No 1421 |
| LRYKKL | SEQ ID No 1422 |
| LRYKMV | SEQ ID No 1423 |
| LRYKSL | SEQ ID No 1424 |
| LRYKVI | SEQ ID No 1425 |
| LRYLAI | SEQ ID No 1426 |
| LRYLDL | SEQ ID No 1427 |
| LRYLTI | SEQ ID No 1428 |
| LRYLTV | SEQ ID No 1429 |
| LRYMSI | SEQ ID No 1430 |
| LRYMVI | SEQ ID No 1431 |
| LRYNCI | SEQ ID No 1432 |
| LRYNGL | SEQ ID No 1433 |
| LRYNII | SEQ ID No 1434 |
| LRYNIL | SEQ ID No 1435 |
| LRYNKI | SEQ ID No 1436 |
| LRYNSL | SEQ ID No 1437 |
| LRYNVI | SEQ ID No 1438 |
| LRYNVL | SEQ ID No 1439 |
| LRYPFL | SEQ ID No 1440 |
| LRYPII | SEQ ID No 1441 |
| LRYPIL | SEQ ID No 1442 |
| LRYPLL | SEQ ID No 1443 |
| LRYPNI | SEQ ID No 1444 |
| LRYPSI | SEQ ID No 1445 |
| LRYPTI | SEQ ID No 1446 |
| LRYPTL | SEQ ID No 1447 |
| LRYPVI | SEQ ID No 1448 |
| LRYPVL | SEQ ID No 1449 |
| LRYQKL | SEQ ID No 1450 |
| LRYQMI | SEQ ID No 1451 |
| LRYQNL | SEQ ID No 1452 |
| LRYRLI | SEQ ID No 1453 |
| LRYRVI | SEQ ID No 1454 |
| LRYSAI | SEQ ID No 1455 |
| LRYSDL | SEQ ID No 1456 |
| LRYSII | SEQ ID No 1457 |
| LRYSMI | SEQ ID No 1458 |
| LRYSSI | SEQ ID No 1459 |
| LRYSTI | SEQ ID No 1460 |
| LRYSTL | SEQ ID No 1461 |
| LRYSVI | SEQ ID No 1462 |
| LRYSVL | SEQ ID No 1463 |
| LRYSVV | SEQ ID No 1464 |
| LRYTAI | SEQ ID No 1465 |
| LRYTIL | SEQ ID No 1466 |
| LRYTLI | SEQ ID No 1467 |
| LRYTMI | SEQ ID No 1468 |
| LRYTNL | SEQ ID No 1469 |
| LRYTPV | SEQ ID No 1470 |
| LRYTSI | SEQ ID No 1471 |
| LRYTSV | SEQ ID No 1472 |
| LRYTTI | SEQ ID No 1473 |
| LRYTTV | SEQ ID No 1474 |
| LRYTVI | SEQ ID No 1475 |
| LRYVEV | SEQ ID No 1476 |
| LRYVTI | SEQ ID No 1477 |
| LRYVTV | SEQ ID No 1478 |
| LSYDSL | SEQ ID No 1479 |
| LSYEDV | SEQ ID No 1480 |
| LSYFGV | SEQ ID No 1481 |
| LSYILI | SEQ ID No 1482 |
| LSYISV | SEQ ID No 1483 |
| LSYKQV | SEQ ID No 1484 |
| LSYKRL | SEQ ID No 1485 |
| LSYLDV | SEQ ID No 1486 |
| LSYMDL | SEQ ID No 1487 |
| LSYNAL | SEQ ID No 1488 |
| LSYNDL | SEQ ID No 1489 |
| LSYNKL | SEQ ID No 1490 |
| LSYNQL | SEQ ID No 1491 |
| LSYPVL | SEQ ID No 1492 |
| LSYQEV | SEQ ID No 1493 |
| LSYQPV | SEQ ID No 1494 |
| LSYQTI | SEQ ID No 1495 |
| LSYRSL | SEQ ID No 1496 |
| LSYRSV | SEQ ID No 1497 |
| LSYSII | SEQ ID No 1498 |
| LSYSSL | SEQ ID No 1499 |
| LSYSTL | SEQ ID No 1500 |
| LSYTKV | SEQ ID No 1501 |
| LSYTSI | SEQ ID No 1502 |
| LSYTTI | SEQ ID No 1503 |
| LSYVLI | SEQ ID No 1504 |
| LTYADL | SEQ ID No 1505 |
| LTYAEL | SEQ ID No 1506 |
| LTYAQV | SEQ ID No 1507 |
| LTYARL | SEQ ID No 1508 |
| LTYCDL | SEQ ID No 1509 |
| LTYCGL | SEQ ID No 1510 |
| LTYCVL | SEQ ID No 1511 |
| LTYEEL | SEQ ID No 1512 |
| LTYEFL | SEQ ID No 1513 |
| LTYGEV | SEQ ID No 1514 |
| LTYGRL | SEQ ID No 1515 |
| LTYKAL | SEQ ID No 1516 |
| LTYLRL | SEQ ID No 1517 |
| LTYMTL | SEQ ID No 1518 |
| LTYNTL | SEQ ID No 1519 |
| LTYPGI | SEQ ID No 1520 |
| LTYQSV | SEQ ID No 1521 |
| LTYSSV | SEQ ID No 1522 |
| LTYTTV | SEQ ID No 1523 |
| LVYDAI | SEQ ID No 1524 |
| LVYDKL | SEQ ID No 1525 |
| LVYDLV | SEQ ID No 1526 |
| LVYENL | SEQ ID No 1527 |
| LVYGQL | SEQ ID No 1528 |
| LVYHKL | SEQ ID No 1529 |
| LVYQEV | SEQ ID No 1530 |
| LVYRKV | SEQ ID No 1531 |
| LVYRNL | SEQ ID No 1532 |
| LVYSEI | SEQ ID No 1533 |
| LVYTNV | SEQ ID No 1534 |
| LVYWEI | SEQ ID No 1535 |
| LVYWKL | SEQ ID No 1536 |
| LVYWRL | SEQ ID No 1537 |
| LWYEGL | SEQ ID No 1538 |
| LWYKYI | SEQ ID No 1539 |
| LWYNHI | SEQ ID No 1540 |
| LWYTMI | SEQ ID No 1541 |
| LYYCQL | SEQ ID No 1542 |
| LYYGDL | SEQ ID No 1543 |
| LYYKKV | SEQ ID No 1544 |
| LYYLLI | SEQ ID No 1545 |
| LYYPKV | SEQ ID No 1546 |
| LYYRRV | SEQ ID No 1547 |
| LYYSTI | SEQ ID No 1548 |
| LYYVRI | SEQ ID No 1549 |
| LYYVVI | SEQ ID No 1550 |
| SAYATL | SEQ ID No 1551 |
| SAYCPL | SEQ ID No 1552 |
| SAYPAL | SEQ ID No 1553 |
| SAYQAL | SEQ ID No 1554 |
| SAYQTI | SEQ ID No 1555 |
| SAYRSV | SEQ ID No 1556 |
| SAYTAL | SEQ ID No 1557 |
| SAYTPL | SEQ ID No 1558 |
| SAYVVL | SEQ ID No 1559 |
| SCYAAV | SEQ ID No 1560 |
| SCYCII | SEQ ID No 1561 |
| SCYCLL | SEQ ID No 1562 |
| SCYDFL | SEQ ID No 1563 |
| SCYEEL | SEQ ID No 1564 |
| SCYEKI | SEQ ID No 1565 |
| SCYHIL | SEQ ID No 1566 |
| SCYPYI | SEQ ID No 1567 |
| SCYRIL | SEQ ID No 1568 |
| SCYRTL | SEQ ID No 1569 |
| SDYCNL | SEQ ID No 1570 |
| SDYEDL | SEQ ID No 1571 |
| SDYENV | SEQ ID No 1572 |
| SDYESV | SEQ ID No 1573 |
| SDYFIV | SEQ ID No 1574 |
| SDYHTL | SEQ ID No 1575 |
| SDYLAI | SEQ ID No 1576 |
| SDYLDI | SEQ ID No 1577 |
| SDYLEL | SEQ ID No 1578 |
| SDYQDL | SEQ ID No 1579 |
| SDYQRL | SEQ ID No 1580 |
| SDYSVI | SEQ ID No 1581 |
| SDYTHL | SEQ ID No 1582 |
| SEYASV | SEQ ID No 1583 |
| SEYEEL | SEQ ID No 1584 |
| SEYFEL | SEQ ID No 1585 |
| SEYGEL | SEQ ID No 1586 |
| SEYITL | SEQ ID No 1587 |
| SEYKAL | SEQ ID No 1588 |
| SEYKEL | SEQ ID No 1589 |
| SEYKGI | SEQ ID No 1590 |
| SEYLAI | SEQ ID No 1591 |
| SEYLEI | SEQ ID No 1592 |
| SEYMVI | SEQ ID No 1593 |
| SEYQSI | SEQ ID No 1594 |
| SEYRPI | SEQ ID No 1595 |
| SEYSEI | SEQ ID No 1596 |
| SEYSSI | SEQ ID No 1597 |
| SEYTPI | SEQ ID No 1598 |
| SEYTYV | SEQ ID No 1599 |
| SFYAAL | SEQ ID No 1600 |
| SFYDSL | SEQ ID No 1601 |
| SFYKGL | SEQ ID No 1602 |
| SFYLYV | SEQ ID No 1603 |
| SFYNAV | SEQ ID No 1604 |
| SFYPSV | SEQ ID No 1605 |
| SFYQQI | SEQ ID No 1606 |
| SFYQQL | SEQ ID No 1607 |
| SFYSAL | SEQ ID No 1608 |
| SFYSDI | SEQ ID No 1609 |
| SFYSKL | SEQ ID No 1610 |
| SFYSRV | SEQ ID No 1611 |
| SFYWNV | SEQ ID No 1612 |
| SFYYLI | SEQ ID No 1613 |
| SGYAQL | SEQ ID No 1614 |
| SGYATL | SEQ ID No 1615 |
| SGYEKL | SEQ ID No 1616 |
| SGYQLV | SEQ ID No 1617 |
| SGYQRI | SEQ ID No 1618 |
| SGYRRL | SEQ ID No 1619 |
| SGYSHL | SEQ ID No 1620 |
| SGYSQL | SEQ ID No 1621 |
| SGYTLI | SEQ ID No 1622 |
| SGYTRI | SEQ ID No 1623 |
| SGYYRV | SEQ ID No 1624 |
| SHYADV | SEQ ID No 1625 |
| SHYFPL | SEQ ID No 1626 |
| SHYIDI | SEQ ID No 1627 |
| SHYKRL | SEQ ID No 1628 |
| SHYQVV | SEQ ID No 1629 |
| SIYAPL | SEQ ID No 1630 |
| SIYATL | SEQ ID No 1631 |
| SIYEEL | SEQ ID No 1632 |
| SIYEEV | SEQ ID No 1633 |
| SIYELL | SEQ ID No 1634 |
| SIYEVL | SEQ ID No 1635 |
| SIYGDL | SEQ ID No 1636 |
| SIYKKL | SEQ ID No 1637 |
| SIYLNI | SEQ ID No 1638 |
| SIYLVI | SEQ ID No 1639 |
| SIYRYI | SEQ ID No 1640 |
| SIYSWI | SEQ ID No 1641 |
| SKYKEI | SEQ ID No 1642 |
| SKYKIL | SEQ ID No 1643 |
| SKYKSL | SEQ ID No 1644 |
| SKYLAV | SEQ ID No 1645 |
| SKYLGV | SEQ ID No 1646 |
| SKYNIL | SEQ ID No 1647 |
| SKYQAV | SEQ ID No 1648 |
| SKYSDI | SEQ ID No 1649 |
| SKYSSL | SEQ ID No 1650 |
| SKYVGL | SEQ ID No 1651 |
| SKYVSL | SEQ ID No 1652 |
| SLYANI | SEQ ID No 1653 |
| SLYAQV | SEQ ID No 1654 |
| SLYAYI | SEQ ID No 1655 |
| SLYDDL | SEQ ID No 1656 |
| SLYDFL | SEQ ID No 1657 |
| SLYDNL | SEQ ID No 1658 |
| SLYDSI | SEQ ID No 1659 |
| SLYDYL | SEQ ID No 1660 |
| SLYEGL | SEQ ID No 1661 |
| SLYEHI | SEQ ID No 1662 |
| SLYELL | SEQ ID No 1663 |
| SLYHCL | SEQ ID No 1664 |
| SLYHKL | SEQ ID No 1665 |
| SLYIGI | SEQ ID No 1666 |
| SLYKKL | SEQ ID No 1667 |
| SLYKNL | SEQ ID No 1668 |
| SLYLAI | SEQ ID No 1669 |
| SLYLGI | SEQ ID No 1670 |
| SLYNAL | SEQ ID No 1671 |
| SLYNLL | SEQ ID No 1672 |
| SLYRNI | SEQ ID No 1673 |
| SLYSDV | SEQ ID No 1674 |
| SLYTCV | SEQ ID No 1675 |
| SLYTTL | SEQ ID No 1676 |
| SLYVAI | SEQ ID No 1677 |
| SLYVDV | SEQ ID No 1678 |
| SLYVSI | SEQ ID No 1679 |
| SLYYAL | SEQ ID No 1680 |
| SLYYNI | SEQ ID No 1681 |
| SLYYPI | SEQ ID No 1682 |
| SMYDGL | SEQ ID No 1683 |
| SMYEDI | SEQ ID No 1684 |
| SMYNEI | SEQ ID No 1685 |
| SMYQSV | SEQ ID No 1686 |
| SMYTWL | SEQ ID No 1687 |
| SMYVSI | SEQ ID No 1688 |
| SNYENL | SEQ ID No 1689 |
| SNYGSL | SEQ ID No 1690 |
| SNYGTI | SEQ ID No 1691 |
| SNYLVL | SEQ ID No 1692 |
| SNYQEI | SEQ ID No 1693 |
| SNYRLL | SEQ ID No 1694 |
| SNYRTL | SEQ ID No 1695 |
| SNYSDI | SEQ ID No 1696 |
| SNYSLL | SEQ ID No 1697 |
| SPYAEI | SEQ ID No 1698 |
| SPYATL | SEQ ID No 1699 |
| SPYEKV | SEQ ID No 1700 |
| SPYGDI | SEQ ID No 1701 |
| SPYGGL | SEQ ID No 1702 |
| SPYNTL | SEQ ID No 1703 |
| SPYPGI | SEQ ID No 1704 |
| SPYPGV | SEQ ID No 1705 |
| SPYQEL | SEQ ID No 1706 |
| SPYRSV | SEQ ID No 1707 |
| SPYSRL | SEQ ID No 1708 |
| SPYTDV | SEQ ID No 1709 |
| SPYTSV | SEQ ID No 1710 |
| SPYVVI | SEQ ID No 1711 |
| SQYCVL | SEQ ID No 1712 |
| SQYEAL | SEQ ID No 1713 |
| SQYKRL | SEQ ID No 1714 |
| SQYLAL | SEQ ID No 1715 |
| SQYLRL | SEQ ID No 1716 |
| SQYMHV | SEQ ID No 1717 |
| SQYSAV | SEQ ID No 1718 |
| SQYTSI | SEQ ID No 1719 |
| SQYWRL | SEQ ID No 1720 |
| SRYAEL | SEQ ID No 1721 |
| SRYATL | SEQ ID No 1722 |
| SRYESL | SEQ ID No 1723 |
| SRYGLL | SEQ ID No 1724 |
| SRYLSL | SEQ ID No 1725 |
| SRYMEL | SEQ ID No 1726 |
| SRYMRI | SEQ ID No 1727 |
| SRYPPV | SEQ ID No 1728 |
| SRYQAL | SEQ ID No 1729 |
| SRYQQL | SEQ ID No 1730 |
| SRYRFI | SEQ ID No 1731 |
| SRYRFV | SEQ ID No 1732 |
| SRYSAL | SEQ ID No 1733 |
| SRYSDL | SEQ ID No 1734 |
| SRYTGL | SEQ ID No 1735 |
| SRYVRL | SEQ ID No 1736 |
| SSYDEL | SEQ ID No 1737 |
| SSYEAL | SEQ ID No 1738 |
| SSYEIV | SEQ ID No 1739 |
| SSYEPL | SEQ ID No 1740 |
| SSYGRL | SEQ ID No 1741 |
| SSYGSI | SEQ ID No 1742 |
| SSYGSL | SEQ ID No 1743 |
| SSYHII | SEQ ID No 1744 |
| SSYHIL | SEQ ID No 1745 |
| SSYHKL | SEQ ID No 1746 |
| SSYHNI | SEQ ID No 1747 |
| SSYIKV | SEQ ID No 1748 |
| SSYNSV | SEQ ID No 1749 |
| SSYQEI | SEQ ID No 1750 |
| SSYRKV | SEQ ID No 1751 |
| SSYRRV | SEQ ID No 1752 |
| SSYSDI | SEQ ID No 1753 |
| SSYTPL | SEQ ID No 1754 |
| SSYTRL | SEQ ID No 1755 |
| SSYTSV | SEQ ID No 1756 |
| SSYTTI | SEQ ID No 1757 |
| SSYVKL | SEQ ID No 1758 |
| STYAEV | SEQ ID No 1759 |
| STYAGI | SEQ ID No 1760 |
| STYAHL | SEQ ID No 1761 |
| STYALV | SEQ ID No 1762 |
| STYAPI | SEQ ID No 1763 |
| STYDHV | SEQ ID No 1764 |
| STYDKV | SEQ ID No 1765 |
| STYDQV | SEQ ID No 1766 |
| STYDRI | SEQ ID No 1767 |
| STYEEL | SEQ ID No 1768 |
| STYEYL | SEQ ID No 1769 |
| STYILV | SEQ ID No 1770 |
| STYLPL | SEQ ID No 1771 |
| STYMAV | SEQ ID No 1772 |
| STYQTL | SEQ ID No 1773 |
| STYRKL | SEQ ID No 1774 |
| STYSQL | SEQ ID No 1775 |
| STYTSI | SEQ ID No 1776 |
| STYYQV | SEQ ID No 1777 |
| SVYATL | SEQ ID No 1778 |
| SVYCFL | SEQ ID No 1779 |
| SVYCNL | SEQ ID No 1780 |
| SVYDSV | SEQ ID No 1781 |
| SVYDTI | SEQ ID No 1782 |
| SVYEKV | SEQ ID No 1783 |
| SVYEML | SEQ ID No 1784 |
| SVYGSV | SEQ ID No 1785 |
| SVYPII | SEQ ID No 1786 |
| SVYQPI | SEQ ID No 1787 |
| SVYRKV | SEQ ID No 1788 |
| SVYSHL | SEQ ID No 1789 |
| SVYSRV | SEQ ID No 1790 |
| SVYTAL | SEQ ID No 1791 |
| SVYTEL | SEQ ID No 1792 |
| SVYWKV | SEQ ID No 1793 |
| SWYDSI | SEQ ID No 1794 |
| SWYFTV | SEQ ID No 1795 |
| SYYKAI | SEQ ID No 1796 |
| SYYLKL | SEQ ID No 1797 |
| SYYSFV | SEQ ID No 1798 |
| SYYVTI | SEQ ID No 1799 |
| VAYADL | SEQ ID No 1800 |
| VAYARI | SEQ ID No 1801 |
| VAYARV | SEQ ID No 1802 |
| VAYDQL | SEQ ID No 1803 |
| VAYGHV | SEQ ID No 1804 |
| VAYKQV | SEQ ID No 1805 |
| VAYKRL | SEQ ID No 1806 |
| VAYNLL | SEQ ID No 1807 |
| VAYQRV | SEQ ID No 1808 |
| VAYSGV | SEQ ID No 1809 |
| VAYSQV | SEQ ID No 1810 |
| VCYCIV | SEQ ID No 1811 |
| VCYGLV | SEQ ID No 1812 |
| VCYGRL | SEQ ID No 1813 |
| VCYIVV | SEQ ID No 1814 |
| VCYLLV | SEQ ID No 1815 |
| VDYDCI | SEQ ID No 1816 |
| VDYDFL | SEQ ID No 1817 |
| VDYFTI | SEQ ID No 1818 |
| VDYFVL | SEQ ID No 1819 |
| VDYGEL | SEQ ID No 1820 |
| VDYILV | SEQ ID No 1821 |
| VDYIQV | SEQ ID No 1822 |
| VDYKNI | SEQ ID No 1823 |
| VDYMSI | SEQ ID No 1824 |
| VDYNLV | SEQ ID No 1825 |
| VDYPDV | SEQ ID No 1826 |
| VDYSDL | SEQ ID No 1827 |
| VDYSSV | SEQ ID No 1828 |
| VDYTTL | SEQ ID No 1829 |
| VDYVDV | SEQ ID No 1830 |
| VDYVGV | SEQ ID No 1831 |
| VDYVIL | SEQ ID No 1832 |
| VDYVQV | SEQ ID No 1833 |
| VEYAPL | SEQ ID No 1834 |
| VEYDPL | SEQ ID No 1835 |
| VEYGTI | SEQ ID No 1836 |
| VEYHRL | SEQ ID No 1837 |
| VEYLEV | SEQ ID No 1838 |
| VEYQLL | SEQ ID No 1839 |
| VEYRPL | SEQ ID No 1840 |
| VEYSSI | SEQ ID No 1841 |
| VEYSTV | SEQ ID No 1842 |
| VFYAEI | SEQ ID No 1843 |
| VFYLAV | SEQ ID No 1844 |
| VFYRQV | SEQ ID No 1845 |
| VFYVGV | SEQ ID No 1846 |
| VFYYVI | SEQ ID No 1847 |
| VFYYVL | SEQ ID No 1848 |
| VGYETI | SEQ ID No 1849 |
| VHYALL | SEQ ID No 1850 |
| VHYARL | SEQ ID No 1851 |
| VHYETL | SEQ ID No 1852 |
| VHYGGV | SEQ ID No 1853 |
| VHYHSL | SEQ ID No 1854 |
| VHYIPV | SEQ ID No 1855 |
| VHYKEI | SEQ ID No 1856 |
| VHYLQV | SEQ ID No 1857 |
| VHYNSL | SEQ ID No 1858 |
| VHYQSV | SEQ ID No 1859 |
| VHYRSL | SEQ ID No 1860 |
| VIYAQL | SEQ ID No 1861 |
| VIYDRL | SEQ ID No 1862 |
| VIYENV | SEQ ID No 1863 |
| VIYEPL | SEQ ID No 1864 |
| VIYERL | SEQ ID No 1865 |
| VIYIDV | SEQ ID No 1866 |
| VIYKKI | SEQ ID No 1867 |
| VIYKRI | SEQ ID No 1868 |
| VIYPFL | SEQ ID No 1869 |
| VIYPNI | SEQ ID No 1870 |
| VIYSDL | SEQ ID No 1871 |
| VIYSML | SEQ ID No 1872 |
| VIYSSV | SEQ ID No 1873 |
| VIYSWI | SEQ ID No 1874 |
| VKYADI | SEQ ID No 1875 |
| VKYARL | SEQ ID No 1876 |
| VKYATL | SEQ ID No 1877 |
| VKYEGL | SEQ ID No 1878 |
| VKYGDL | SEQ ID No 1879 |
| VKYGSV | SEQ ID No 1880 |
| VKYLLV | SEQ ID No 1881 |
| VKYNPV | SEQ ID No 1882 |
| VKYPPI | SEQ ID No 1883 |
| VKYQRL | SEQ ID No 1884 |
| VKYQVI | SEQ ID No 1885 |
| VKYSEV | SEQ ID No 1886 |
| VKYSNV | SEQ ID No 1887 |
| VKYSRL | SEQ ID No 1888 |
| VKYSTL | SEQ ID No 1889 |
| VKYVDL | SEQ ID No 1890 |
| VLYADI | SEQ ID No 1891 |
| VLYAML | SEQ ID No 1892 |
| VLYASV | SEQ ID No 1893 |
| VLYCLL | SEQ ID No 1894 |
| VLYCLV | SEQ ID No 1895 |
| VLYCVL | SEQ ID No 1896 |
| VLYDCL | SEQ ID No 1897 |
| VLYFHI | SEQ ID No 1898 |
| VLYFTV | SEQ ID No 1899 |
| VLYGDL | SEQ ID No 1900 |
| VLYGQL | SEQ ID No 1901 |
| VLYPMV | SEQ ID No 1902 |
| VLYPRL | SEQ ID No 1903 |
| VLYPRV | SEQ ID No 1904 |
| VLYSEL | SEQ ID No 1905 |
| VLYSRV | SEQ ID No 1906 |
| VLYTAV | SEQ ID No 1907 |
| VLYTIL | SEQ ID No 1908 |
| VMYDAV | SEQ ID No 1909 |
| VNYESI | SEQ ID No 1910 |
| VNYSAL | SEQ ID No 1911 |
| VNYSKI | SEQ ID No 1912 |
| VNYSSI | SEQ ID No 1913 |
| VPYALL | SEQ ID No 1914 |
| VPYDTL | SEQ ID No 1915 |
| VPYEDV | SEQ ID No 1916 |
| VPYEEL | SEQ ID No 1917 |
| VPYKTI | SEQ ID No 1918 |
| VPYLRV | SEQ ID No 1919 |
| VPYNDL | SEQ ID No 1920 |
| VPYPAL | SEQ ID No 1921 |
| VPYQEL | SEQ ID No 1922 |
| VPYRLL | SEQ ID No 1923 |
| VPYSEL | SEQ ID No 1924 |
| VPYTLL | SEQ ID No 1925 |
| VPYTPL | SEQ ID No 1926 |
| VPYTTL | SEQ ID No 1927 |
| VPYVEL | SEQ ID No 1928 |
| VPYVMV | SEQ ID No 1929 |
| VPYVSL | SEQ ID No 1930 |
| VQYKAV | SEQ ID No 1931 |
| VQYKEI | SEQ ID No 1932 |
| VQYNIV | SEQ ID No 1933 |
| VQYRPV | SEQ ID No 1934 |
| VQYSQI | SEQ ID No 1935 |
| VQYSTV | SEQ ID No 1936 |
| VQYTEV | SEQ ID No 1937 |
| VQYYNI | SEQ ID No 1938 |
| VRYARL | SEQ ID No 1939 |
| VRYDNL | SEQ ID No 1940 |
| VRYGRI | SEQ ID No 1941 |
| VRYKKL | SEQ ID No 1942 |
| VRYKRV | SEQ ID No 1943 |
| VRYLDV | SEQ ID No 1944 |
| VRYRTI | SEQ ID No 1945 |
| VRYSDI | SEQ ID No 1946 |
| VRYTQL | SEQ ID No 1947 |
| VRYVCL | SEQ ID No 1948 |
| VSYAEL | SEQ ID No 1949 |
| VSYASV | SEQ ID No 1950 |
| VSYEPI | SEQ ID No 1951 |
| VSYGDI | SEQ ID No 1952 |
| VSYIGL | SEQ ID No 1953 |
| VSYILV | SEQ ID No 1954 |
| VSYMML | SEQ ID No 1955 |
| VSYNNI | SEQ ID No 1956 |
| VSYNNL | SEQ ID No 1957 |
| VSYQEI | SEQ ID No 1958 |
| VSYQPI | SEQ ID No 1959 |
| VSYSAV | SEQ ID No 1960 |
| VSYSFL | SEQ ID No 1961 |
| VSYSLV | SEQ ID No 1962 |
| VSYSPV | SEQ ID No 1963 |
| VSYTML | SEQ ID No 1964 |
| VSYTNL | SEQ ID No 1965 |
| VSYTPL | SEQ ID No 1966 |
| VSYVKI | SEQ ID No 1967 |
| VSYVLL | SEQ ID No 1968 |
| VTYADL | SEQ ID No 1969 |
| VTYAEL | SEQ ID No 1970 |
| VTYAEV | SEQ ID No 1971 |
| VTYAKV | SEQ ID No 1972 |
| VTYAPV | SEQ ID No 1973 |
| VTYAQL | SEQ ID No 1974 |
| VTYATL | SEQ ID No 1975 |
| VTYATV | SEQ ID No 1976 |
| VTYGNI | SEQ ID No 1977 |
| VTYITI | SEQ ID No 1978 |
| VTYQII | SEQ ID No 1979 |
| VTYQIL | SEQ ID No 1980 |
| VTYQLL | SEQ ID No 1981 |
| VTYSAL | SEQ ID No 1982 |
| VTYSTL | SEQ ID No 1983 |
| VTYTLL | SEQ ID No 1984 |
| VTYTQL | SEQ ID No 1985 |
| VTYVNL | SEQ ID No 1986 |
| VVYADI | SEQ ID No 1987 |
| VVYEDV | SEQ ID No 1988 |
| VVYFCL | SEQ ID No 1989 |
| VVYKTL | SEQ ID No 1990 |
| VVYQKL | SEQ ID No 1991 |
| VVYSEV | SEQ ID No 1992 |
| VVYSQV | SEQ ID No 1993 |
| VVYSVV | SEQ ID No 1994 |
| VVYTVL | SEQ ID No 1995 |
| VVYYRI | SEQ ID No 1996 |
| VYYHWL | SEQ ID No 1997 |
| VYYLPL | SEQ ID No 1998 |

[0287] In some embodiments, the ITIM, or at least one of the ITIMs when several ITIMs are present in the intracellular domain is selected from LSYRSL, LPYYDL, LLYSRL, LIYTLL, LLYADL, ISYTTL, VTYSAL, IHYSEL, VDYVIL, LHYASL, LDYDYL, VDYDFL, VTYSTL, IIYSEV, LEYLCL, VLYGQL, VPYTPL, ISYPML, VSYTNL, LLYEMV, VDYNLV, ITYFAL, VHYQSV, VPYVMV, IPYRTV, IAYSLL, VCYGRL, LKYLYL, LLYEHV, ITYSLL, VLYSEL, IWYNIL, ISYKGL, IDYYNL, LEYLQL, LKYRGL, VLYASV, LQYLSL, LFYRHL, VQYKAV, LSYSSL, LSYTKV, VQYSTV, VKYNPV, VVYSEV, LEYVSV, LAYHTV, VQYLRL, VTYTQL, IVYTEL, IVYAEL, VTYAQL, ILYTEL, ITYAAV, VIYIDV, VTYAEV, VTYAPV, VTYAKV, VTYARL, ILYHTV, VLYAML, VIYAQL, LVYENL, LCYADL, ISYASL, LTYVLL, VTYVNL, VRYSIV, VFYRQV, LKYMEV, VDYGEL, LSYMDL, VLYTAV, VQYTEV, IVYASL, VEYLEV, LEYVDL, ITYADL, LTYADL, VIYENV, LAYYTV, VSYSAV, LVYDKL, LNYMVL, LNYACL, LDYINV, LHYATL, LHYAVL, IQYAPL, IQYASL, LLYLLL, VVYSQV, VIYSSV, VVYYRV, VPYVEL, LDYDKL, LSYPVL, VAYSQV, LFYWDV, LIYSQV, or LDYEFL.

[0288] In some embodiments, p is 1, 2, 3, 4, 5, 6, 7, 8, 9, 10, 11, 12, 13, 14, 15, 16, 17, 18, 19 or 20.

[0289] In some embodiments, p is 1, 2, 3, 4, 5, 6, 7, 8, 9, or 10. In some embodiments, p is 1, 2, 3, 4 or 5. In some embodiments, p is 1. In some embodiments, p is 2. In some embodiments, p is 3. In some embodiments, p is 4. In some embodiments, p is 5.

[0290] In some embodiments, n is 1, 2, 3, 4, 5, 6, 7, 8, 9, or 10. In some embodiments, n is 1, 2, 3, 4 or 5. In some embodiments, n is 0. In some embodiments, n is 1. In some embodiments, n is 2. In some embodiments, n is 3.

[0291] In some embodiments, m is 1, 2, 3, 4, 5, 6, 7, 8, 9, 10, 11, 12, 13, 14, 15, 16, 17, 18, 19 or 20. In some embodiments, m is 1, 2, 3, 4, 5, 6, 7, 8, 9, or 10. In some embodiments, m is 1, 2, 3, 4 or 5. In some embodiments, m is 1. In some embodiments, m is 2. In some embodiments, m is 3. In some embodiments, m is 4. In some embodiments, m is 5.

[0292] In some embodiments, n is 1 and m is 1.

[0293] In some embodiments, n is 1 and m is 1 and p is 1 to 10.

[0294] In some embodiments, n is 1 and m is 1 and p is 1.

[0295] In some embodiments, n is 0 and m is 1 and p is 1 to 20.

[0296] In some embodiments, n is 0, m is 1 to 6 and p is 1.

[0297] In some embodiments, n is 0, m is 1 and p is 1.

[0298] In some embodiments, n is 0, m is 2 and p is 1.

[0299] In some embodiments, n is 0, m is 3 and p is 1.

[0300] In some embodiments, n is 0, m is 4 and p is 1.

[0301] In some embodiments, n is 0, m is 5 and p is 1.

[0302] In some embodiments, n is 0, m is 6 and p is 1.

[0303] In some embodiments, n is 0, m is 1 to 6 and p is 1 and ITSM is TEYATI.

[0304] In some embodiments, n is 0, m is 1 to 6 and p is 1 and ITSM is TEYSEI.

[0305] In some embodiments, n is 0, m is 1 to 6 and p is 1 and ITSM is TVYSEV.

[0306] In some embodiments, n is 1, m is 1 and p is 1 to 5.

[0307] In some embodiments, n is 1, m is 1 and p is 1.

[0308] In some embodiments, n is 1, m is 1 and p is 2.

[0309] In some embodiments, n is 1, m is 1 and p is 3.

[0310] In some embodiments, n is 1, m is 1 and p is 4.

[0311] In some embodiments, n is 1, m is 1 and p is 5.

[0312] In some embodiments, n is 1, m is 1 and p is 1 to 5 and ITIM is VDYGEL and ITSM is TEYATI.

[0313] In some embodiments, n is 1, m is 1 and p is 1 to 5 and ITIM is LX₆YAX₈L wherein X₆ is selected from H or Q and X₈ is V or S, and ITSM is TEYSEI.

[0314] In some embodiments, n is 1, m is 1 and p is 1 to 5 and ITIM is LX₆YAX₈L wherein X₆ is selected from H or Q and X₈ is V or S, and ITSM is TEYASI.

[0315] In some embodiments, n is 1, m is 1 and p is 1 to 5 and ITIM is LX₆YAX₈L wherein X₆ is selected from H or Q and X₈ is V or S, and ITSM is TVYSEV.

[0316] In some embodiments, the intracellular domain comprises several ITSMs having the same amino acid sequence.

[0317] In some embodiments, the intracellular domain comprises several ITSMs having different amino acid sequences.

[0318] In some embodiments, the intracellular domain comprises several ITIMs having the same amino acid sequence.

[0319] In some embodiments, the intracellular domain comprises several ITIMs having different amino acid sequences.

[0320] In some embodiments, the intracellular domain of the NCAR is selected from SEQ ID No 2000, SEQ ID No 2001, SEQ ID No 2002, SEQ ID No 2003, SEQ ID No 2004, SEQ ID No 2005, SEQ ID No 2006, SEQ ID No 2007, SEQ ID No 2008, SEQ ID No 2009, SEQ ID No 2010, SEQ ID No 2011, SEQ ID No 2012, SEQ ID No 2013, SEQ ID No 2014, SEQ ID No 2015, SEQ ID No 2016 and SEQ ID No 2017.

TABLE 1
Naturally occurring N-terminal flanking region of ITIM.*ITSM
intracellular domains varying in length from 1-520 (Table 1
comprises SEQ ID No 1 to SEQ ID No 36)

| | |
|---|---|
| N | |
| ELFANKRKYT | SEQ ID No 1 |
| RKRNNSRLGNG | SEQ ID No 2 |
| YRHRKKRNGLT | SEQ ID No 3 |
| YKMYGSEMLHKRDPLDEDEDTD | SEQ ID No 4 |
| LRKRRDSLSLSTQRTQGPAESARN | SEQ ID No 5 |
| WRMMKYQQKAAGMSPEQVLQPLEGD | SEQ ID No 6 |
| CSRAARGTIGARRTGQPLKEDPSAVPVFS | SEQ ID No 7 |
| RIRQKKAQGSTSSTRLHEPEKNAREITQDTND | SEQ ID No 8 |
| NNSYQEIEEDADVEWKFARAKLWLSYFDEGRTLPAPFNLVPSPK | SEQ ID No 9 |
| WLHRRLPPQPIRPLPRFAPLVKTEPQRPVKEEEPKIPGDLDQEPS | SEQ ID No 10 |
| SNKCDVVVVGGGISGMAAAKLLHDSGLNVVVLEARDRVGGRTYTLRNQK | SEQ ID No 11 |
| KTHRRKAARTAVGRNDTHPTTGSASPKHQKKSKLHGPTETSSCSGAAPT | SEQ ID No 12 |
| VEMDEE | |
| RVKTRRKKAAQPVQNTDDVNPVMVSGSRGHQHQFQTGIVSDHPAEAGPI | SEQ ID No 13 |
| SEDEQE | |
| KARRKQAAGRPEKMDDEDPIMGTITSGSRKKPWPDSPGDQASPPGDAP | SEQ ID No 14 |
| PLEEQKE | |
| KICRKEARKRAAAEQDVPSTLGPISQGHQHECSAGSSQDHPPPGAATYT | SEQ ID No 15 |
| PGKGEEQE | |
| MENQEKASIAGHMFDVVVIGGGISGLSAAKLLTEYGVSVLVLEARDRVGG | SEQ ID No 16 |
| RTYTIRNEH | |
| VRSCRKKSARPAAGVGDTGIEDANAVRGSASQGPLTEPWAEDSPPDQP | SEQ ID No 17 |
| PPASARSSVGEGE | |
| KCYFLRKAKAKQMPVEMSRPAVPLLNSNNEKMSDPNMEANSHYGHNDD | SEQ ID No 18 |
| VRNHAMKPINDNKEPLNSD | |
| VRLRLQKHRPPADPCRGETETMNNLANCQREKDISVSIIGATQIKNTNKKA | SEQ ID No 19 |
| DFHGDHSADKNGFKARYPA | |
| RRHQGKQNELSDTAGREINLVDAHLKSEQTEASTRQNSQVLLSETGIYDN | SEQ ID No 20 |
| DPDLCFRMQEGSEVYSNPCLEENKPG | |
| QSVFNKRKSRVRHYLVKCPQNSSGETVTSVTSLAPLQPKKGKRQKEKPDI | SEQ ID No 21 |
| PPAVPAKAPIAPTFHKPKLLKPQRKVTLPKIAEEN | |
| MSDKMSSFLHIGDICSLYAEGSTNGFISTLGLVDDRCVVQPETGDLNNPP | SEQ ID No 22 |
| KKFRDCLFKLCPMNRYSAQKQFWKAAKPGANSTTDAVLLNKLHHAADLE | |
| KKQNETENRKLLGTV | |
| MTEKMSSFLYIGDIVSLYAEGSVNGFISTLGLVDDRCVVHPEAGDLANPPK | SEQ ID No 23 |
| KFRDCLFKVCPMNRYSAQKQYWKAKQAKQGNHTEAALLKKLQHAAELE | |
| QKQNESENKKLLGEI | |
| MSEMSSFLHIGDIVSLYAEGSVNGFISTLGLVDDRCVVEPAAGDLDNPPKK | SEQ ID No 24 |
| FRDCLFKVCPMNRYSAQKQYWKAKQTKQDKEKIADVVLLQKLQHAAQME | |
| QKQNDTENKKVHGDV | |
| NCVSCCKDPEIDFKEFEDNFDDEIDFTPPAEDTPSVQSPAEVFTLSVPNIS | SEQ ID No 25 |
| LPAPSQFQPSVEGLKSQVARHSLNYIQEIGNGWFGKVLLGEIYTGTSVAR | |
| VIVKELKASANPKEQDTFLKNGEPYYILQHPNILQCVGQCVEA | |
| KRVQETKFGNAFTEEDSELVVNYIAKKSFCRRAIELTLHSLGVSEELQNKL | SEQ ID No 26 |
| EDVVIDRNLLILGKILGEGEF | |
| GSVMEGNLKQEDGTSLKVAVKTMKLDNSSQREIEEFLSEAACMKDFSHP | |
| NVIRLLGVCIEMSSQGIPKPMVILPFMKYGDLHTY | |
| HRRKKETRYGEVFEPTVERGELVVRYRVRKSYSRRTTEATLNSLGISEEL | SEQ ID No 27 |
| KEKLRDVMVDRHKVALGKTLGEGEFGAVMEGQLNQDDSILKVAVKTMKIA | |
| ICTRSELEDFLSEAVCMKEFDHPNVMRLIGVCFQGSERESFPAPVVILPFM | |
| KHGDLHSF | |
| MSGGASATGPRRGPPGLEDTTSKKKQKDRANQESKDGDPRKETGSRYV | SEQ ID No 28 |
| AQAGLEPLASGDPSASASHAAGITGSRHRTRLFFPSSSGSASTPQEEQTK | |
| EGACEDPHDLLATPTPELLLDWRQSAEEVIVKLRVGVGPLQLEDVDAAFT | |
| DTDCVVRFAGGQQWGG | |
| AYKRKSRESDLTLKRLQMQMDNLESRVALECKEAFAELQTDIHELTSDLD | SEQ ID No 29 |
| GAGIPFLDYRTYTMRVLFPGIEDHPVLRDLEVPGYRQERVEKGLKLFAQLI | |
| NNKVFLLSFIRTLESQRSFSMRDRGNVASLIMTVLQSKLEYATDVLKQLLA | |
| DLIDKNLESKNHPKLLLRRTESVAEKMLTNWFTF | |
| YKRKTQDADRTLKRLQLQMDNLESRVALECKEAFAELQTDINELTNHMDE | SEQ ID No 30 |
| VQIPFLDYRTYAVRVLFPGIEAHPVLKELDTPPNVEKALRLFGQLLHSRAFV | |
| LTFIHTLEAQSSFSMRDRGTVASLTMVALQSRLDYATGLLKQLLADLIEKNL | |
| ESKNHPKLLLRRTESVAEKMLTNWFTFLLHKFLKECAGEPLF | |
| RWHCPRRLLGACWTLNGQEEPVSQPTPQLENEVSRQHLPATLPEMVAF | SEQ ID No 31 |
| YQELHTPTQGQTMVRQLMHKLLVFSAREVDHRGGCLMLQDTGISLLIPPG | |
| AVAVGRQERVSLILVWDLSDAPSLSQAQGLVSPVVACGPHGASFLKPCTL | |
| TFKHCAEQPSHARTYSSNTTLLDAKVWRPLGRPGAHASRDECRIHLSHF | |
| KQKPRYEIRWRVIESISPDGHEYIYVDPMQLPYDSRWEFPRDGLVLGRVL | SEQ ID No 32 |
| GSGAFGKVVEGTAYGLSRSQPVMKVAVKMLKPTARSSEKQALMSELKIM | |
| THLGPHLNIVNLLGACTKSGPIYIITEYCFYGDLVNYLHKNRDSFLSHHPEK | |
| PKKELDIFGLNPADESTRSYVILSFENNGDYMDMKQADTTQYVPMLERKEV | |
| MFNYTFQQVQEHTDQIWKFQRHDLIEEYHGRPAAPPPFILLSHLQLFIKRV | SEQ ID No 33 |
| VLKTPAKRHKQLKNKLEKNEEAALLSWEIYLKENYLQNRQFQQKQRPEQK | |
| IEDISNKVDAMVDLLDLDPLKRSGSMEQRLASLEEQVAQTAQALHWIVRTL | |
| RASGFSSEADVPTLASQKAAEEPDAEPGGRKKTEEPGDSYHVNARHLLY | |
| PNCPVTRFPVPNEKVPWETEFLIYDPPFYTAERKDAAAMDPMGDTLEPLST | |
| CCDCGGAPRSAAGFEPVPECSDGAIHSWAVEGPQPEPRDITTVIPQIPPD | SEQ ID No 34 |
| NANIIECIDNSGVYTNEYGGREMQDLGGGERMTGFELTEGVKTSGMPEIC | |
| QEYSGTLRRNSMRECREGGLNMNFMESYFCQKAYAYADEDEGRPSNDC | |
| LLIYDIEGVGSPAGSVGCCSFIGEDLDDSFLDTLGPKFKKLADISLGKESYP | |
| DLDPSWPPQSTEPVCLPQETEPVVSGHPPISPHFGTTTVISESTYPSGPG | |
| VLHPKPILDP | |
| MADGGEGEDEIQFLRTDDEVVLQCTATIHKEQQKLCLAAEGFGNRLCFLE | SEQ ID No 35 |
| STSNSKNVPPDLSICTFVLEQSLSVRALQEMLANTVEKSEGQVDVEKWKF | |
| MMKTAQGGGHRTLLYGHAILLRHSYSGMYLCCLSTSRSSTDKLAFDVGL | |
| QEDTTGEACWWTIHPASKQRSEGEKVRVGDDLILVSVSSERYLHLSYGN | |
| GSLHVDAAFQQTLWSVAPISSGSEAAQGYLIGGDVLRLLHGHMDECLTVP | |
| SGEHGEEQRRTVHYEGGAVSVHARSLWRLETLRVAWSGSHIRWGQPFR | |
| LRHVTTGKYLSLMEDKNLLLMDKEKADVKSTAFTFRSSKEKLDVGVRKEV | |
| DGMGTSEIKYGDSVCYIQHVDTGLW | |
| MGDAEGEDEVQFLRTDDEVVLQCSATVLKEQLKLCLAAEGFGNRLCFLE | SEQ ID No 36 |
| PTSNAQNVPPDLAICCFVLEQSLSVRALQEMLANTVEAGVESSQGGGHR | |
| TLLYGHAILLRHAHSRMYLSCLTTSRSMTDKLAFDVGLQEDATGEACWWT | |
| MHPASKQRSEGEKVRVGDDIILVSVSSERYLHLSTASGELQVDASFMQTL | |
| WNMNPICSRCEEGFVTGGHVLRLFHGHMDECLTISPADSDDQRRLVYYE | |
| GGAVCTHARSLWRLEPLRISWSGSHLRWGQPLRVRHVTTGQYLALTEDQ | |
| GLVVVDASKAHTKATSFCFRISKEKLDVAPKRDVEGMGPPEIKYGESLCF | |
| VQHVASGLWLTYAAPDPKALRLGVLKKKAMLHQEGHMDDALSLTRCQQE | |
| ESQAARMIHSTNGLYNQFIKSLDSFSGKPRGSGPPAGTALPIEGVILSLQD | |
| LIIYFEPPSEDLQHEEKQSKLRSLRNRQSLFQEEGMLSMVLNCIDRLNVYT | |
| TAAHFAEFAGEEAAESWKEIVN | |

TABLE 2
Examples of intracellular domains of known inhibitory receptors

| | |
|---|---|
| CTLA4 | AVSLSKMLKKRSPLTTGVYVKMPPTEPECEKQFQPYFIPIN (SEQ ID No 37) |
| LAG3 | HLWRRQWRPRRFSALEQGIHPPQAQSKIEELEQEPEPEPEPEPEPEPEPEPE |
| | QL (SEQ ID No 38) |
| HAVCR2 | FKWYSHSKEKIQNLSLISLANLPPSGLANAVAEGIRSEENIYTIEENVYEVEEPNE |
| (TIM3) | YYCYVSSRQQPSQPLGCRFAMP (SEQ ID No 39) |
| LAIR1 | HRQNQIKQGPPRSKDEEQKPQQRPDLAVDVLERTADKATVNGLPEKDRETDT |
| | SALAAGSSQEVTYAQLDHWALTQRTARAVSPQSTKPMAESITYAAVARH (SEQ |
| | ID No 40) |
| KIR2DL2 | HRWCSNKKNAAVMDQESAGNRTANSEDSDEQDPQEVTYTQLNHCVFTQRKI |
| | TRPSQRPKTPPTDIIVYAELPNAESRSKVVSCP (SEQ ID No 41) |
| LILRB1 | LRHRRQGKHWTSTQRKADFQHPAGAVGPEPTDRGLQWRSSPAADAQEENLY |
| | AAVKHTQPEDGVEMDTRSPHDEDPQAVTYAEVKHSRPRREMASPPSPLSGEF |
| | LDTKDRQAEEDRQMDTEAAASEAPQDVTYAQLHSLTLRREATEPPPSQEGPS |
| | PAVPSIYATLAIH (SEQ ID No 2021) |
| TIGIT | LTRKKKALRIHSVEGDLRRKSAGQEEWSPSAPSPPGSCVQAEAAPAGLCGEQ |
| | RGEDCAELHDYFNVLSYRSLGNCSFFTETG (SEQ ID No 2022) |
| CEACAM1 | HFGKTGRASDQRDLTEHKPSVSNHTQDHSNDPPNKMNEVTYSTLNFEAQQPT |
| | QPTSASPSLTATEIIYSEVKKQ (SEQ ID No 2023) |
| CSF1R | KYKQKPKYQVRWKIIESYEGNSYTFIDPTQLPYNEKWEFPRNNLQFGKTLGAG |
| | AFGKVVEATAFGLGKEDAVLKVAVKMLKSTAHADEKEALMSELKIMSHLGQHE |
| | NIVNLLGACTHGGPVLVITEYCCYGDLLNFLRRKAEAMLGPSLSPGQDPEGGV |
| | DYKNIHLEKKYVRRDSGFSSQGVDTYVEMRPVSTSSNDSFSEQDLDKEDGRP |
| | LELRDLLHFSSQVAQGMAFLASKNCIHRDVAARNVLLTNGHVAKIGDFGLARDI |
| | MNDSNYIVKGNARLPVKWMAPESIFDCVYTVQSDVWSYGILLWEIFSLGLNPY |
| | PGILVNSKFYKLVKDGYQMAQPAFAPKNIYSIMQACWALEPTHRPTFQQICSFL |
| | QEQAQEDRRERDYTNLPSSSRSGGSGSSSSELEEESSSEHLTCCEQGDIAQP |
| | LLQPNNYQFC ((SEQ ID No 2024) |
| CD5 | KKLVKKFRQKKQRQWIGPTGMNQNMSFHRNHTATVRSHAENPTASHVDNEY |
| | SQPPRNSHLSAYPALEGALHRSSMQPDNSSDSDYDLHGAQRL ((SEQ ID No |
| | 2025) |
| CD96 | RKWCQYQKEIMERPPPFKPPPPPIKYTCIQEPNESDLPYHEMETL (SEQ ID No |
| | 2026) |
| CD22 | KLQRRWKRTQSQQGLQENSSGQSFFVRNKKVRRAPLSEGPHSLGCYNPMME |
| | DGISYTTLRFPEMNIPRTGDAESSEMQRPPPDCDDTVTYSALHKRQVGDYENV |
| | IPDFPEDEGIHYSELIQFGVGERPQAQENVDYVILKH (SEQ ID No 2027) |

TABLE 3
Examples of naturally occurring N-terminal flanking regions
of ITIM only intracellular domains varying in length from
0 to 4211 (Table 3 comprises SEQ ID No 42 to SEQ ID No 351)

| | |
|---|---|
| K | |
| V | |
| Q | |
| V | |
| T | |
| F | |
| Y | |
| LL | |
| QP | |
| EH | |
| NL | |
| KW | |
| LV | |
| NP | |
| TF | |
| RL | |
| LNP | |
| KCP | |
| ETL | |
| RRA | |
| MAQ | |
| RRRP | SEQ ID No 42 |
| MSEE | SEQ ID No 43 |
| MTSE | SEQ ID No 44 |
| DRYL | SEQ ID No 45 |
| MTDS | SEQ ID No 46 |
| AAKP | SEQ ID No 47 |
| QHFS | SEQ ID No 48 |
| MKPK | SEQ ID No 49 |
| IAAL | SEQ ID No 50 |
| CLNP | SEQ ID No 51 |
| QKVL | SEQ ID No 52 |
| DRYQS | SEQ ID No 53 |
| LKAKD | SEQ ID No 54 |
| DRYYA | SEQ ID No 55 |
| MSYYG | SEQ ID No 56 |
| SSSKP | SEQ ID No 57 |
| LKIRH | SEQ ID No 58 |
| DVRHV | SEQ ID No 59 |
| DRFYA | SEQ ID No 60 |
| EGWRI | SEQ ID No 61 |
| SDIKR | SEQ ID No 62 |
| LHHKKY | SEQ ID No 63 |
| TVDRYL | SEQ ID No 64 |
| SSPTFR | SEQ ID No 65 |
| WRRAGH | SEQ ID No 66 |
| YRVDLV | SEQ ID No 67 |
| NSFDLA | SEQ ID No 68 |
| YRSGIT | SEQ ID No 69 |
| YRLGLT | SEQ ID No 70 |
| QHIMAI | SEQ ID No 71 |
| NSCANP | SEQ ID No 72 |
| RRFCAT | SEQ ID No 73 |
| GDMANNS | SEQ ID No 74 |
| MAYQSLR | SEQ ID No 75 |
| TARNLTV | SEQ ID No 76 |
| MERAEEP | SEQ ID No 77 |
| SMDRFLA | SEQ ID No 78 |
| LRLAAAP | SEQ ID No 79 |
| LRLFAAP | SEQ ID No 80 |
| KRLIALS | SEQ ID No 81 |
| YSNSSVNP | SEQ ID No 82 |
| YANSCVNP | SEQ ID No 83 |
| KLSPRVKR | SEQ ID No 84 |
| KIRLRCQS | SEQ ID No 85 |
| SCDLLTAF | SEQ ID No 86 |
| MASESSPL | SEQ ID No 87 |
| KTANEGGS | SEQ ID No 88 |
| DFAKEGHS | SEQ ID No 89 |
| DHVRRKDS | SEQ ID No 90 |
| DNVKKENS | SEQ ID No 91 |
| VMWKHRYQ | SEQ ID No 92 |
| KMYYSRRG | SEQ ID No 93 |
| DRYIAIRIP | SEQ ID No 94 |
| DRYLAICVP | SEQ ID No 95 |
| DRYLRVKLT | SEQ ID No 96 |
| DRYIGVSYP | SEQ ID No 97 |
| DRYIGVRYS | SEQ ID No 98 |
| DRYVGVRHS | SEQ ID No 99 |
| DRYLAVTNP | SEQ ID No 100 |
| MPFHPVTAA | SEQ ID No 101 |
| DRYISIHRP | SEQ ID No 102 |
| MQLKILVSA | SEQ ID No 103 |
| WKQRRAKEK | SEQ ID No 104 |
| DRFIAVVHP | SEQ ID No 105 |
| DRYIAITKP | SEQ ID No 106 |
| NRYCYICHS | SEQ ID No 107 |
| DRYLAITKP | SEQ ID No 108 |
| DRYCAVMDP | SEQ ID No 109 |
| DRYISIFYA | SEQ ID No 110 |
| DRYITIFHA | SEQ ID No 111 |
| NRYCYICHS | SEQ ID No 112 |
| WKKICNKSS | SEQ ID No 113 |
| WCYRKRYFV | SEQ ID No 114 |
| AHSNSCLNP | SEQ ID No 115 |
| PVFYKLGIT | SEQ ID No 116 |
| KFHRSRRLLG | SEQ ID No 117 |
| VDRYLRVKIP | SEQ ID No 118 |
| FERSCRKENM | SEQ ID No 119 |
| LPSIYLVFLI | SEQ ID No 120 |
| SSKTFQTWQS | SEQ ID No 121 |
| IDRYIAVCHP | SEQ ID No 122 |
| SFCLRNLFFP | SEQ ID No 123 |
| LLKTAKEGGS | SEQ ID No 124 |
| MWRNSKVMNI | SEQ ID No 125 |
| VEKKLFIHEYI | SEQ ID No 126 |
| RKRNNSRLGNG | SEQ ID No 127 |
| QRITVHVTRRP | SEQ ID No 128 |
| MEAAHAKTTEEC | SEQ ID No 129 |
| MARISFSYLCPA | SEQ ID No 130 |
| CCKRQKGKPKRK | SEQ ID No 131 |
| MTGDKGPQRLSG | SEQ ID No 132 |
| PDIPQSVKNKVLE | SEQ ID No 133 |
| KIFKIDIVLWYRD | SEQ ID No 134 |
| TEYVVRLWSAGCR | SEQ ID No 135 |
| QSKSELSHYTFYF | SEQ ID No 136 |
| SIVAYKQVPL | SEQ ID No 137 |
| SLDFFGSQNTQDD | SEQ ID No 138 |
| LWLHNGRSCFGVNR | SEQ ID No 139 |
| RFLRLNLKPDLSDT | SEQ ID No 140 |
| REHQRSGSYHVREE | SEQ ID No 141 |
| MITLTELKCLADAQ | SEQ ID No 142 |
| YNLTRLCRWDKRLL | SEQ ID No 143 |
| AFMNENFKKNVLSA | SEQ ID No 144 |
| MIYRLAQAEERQQLE | SEQ ID No 145 |
| KFRKNFWKLVKDIGC | SEQ ID No 146 |
| ALALAALAAVEPACG | SEQ ID No 147 |
| KKIAAATETAAQENA | SEQ ID No 148 |
| YRKVSKAEEAAQENA | SEQ ID No 149 |
| LKDFSILLMEGVPKS | SEQ ID No 150 |
| TVATAVEQYVPSEKL | SEQ ID No 151 |
| MGRQKELVSRCGEMLH | SEQ ID No 152 |
| CKRRRGQSPQSSPDLP | SEQ ID No 153 |
| LLEGVHLFLTARNLTV | SEQ ID No 154 |
| EERERKHHLKHGPNAP | SEQ ID No 155 |
| PLTHRLLCSEEPPRLH | SEQ ID No 156 |
| LYLLVRKHINRAHTAL | SEQ ID No 157 |
| KLPLWGQPSDQNCYDD | SEQ ID No 158 |
| MYRLKVLQMRLRSAITG | SEQ ID No 159 |
| SMRGTICNPGPRKSMSK | SEQ ID No 160 |
| RILVRKLEPAQGSLHTQ | SEQ ID No 161 |
| SRYATLMQKDSSQETT | SEQ ID No 162 |
| SSHFGCQLVCCQSSNVS | SEQ ID No 163 |
| RILMRKLRTQETRGNEV | SEQ ID No 164 |
| RILLQKLRPPDIRKSDS | SEQ ID No 165 |
| RILLQKLTSPDVGGNDQ | SEQ ID No 166 |
| RSVRPCFTQAAFLKSKYW | SEQ ID No 167 |
| RSGRGRKLSGDQITLPTT | SEQ ID No 168 |
| MAAENEASQESALGAYSP | SEQ ID No 169 |
| TAHVFSCLSLRLRAAFFY | SEQ ID No 170 |
| NPFIYSRNSAGLRRKVLWC | SEQ ID No 171 |
| NNESSNNPSSIASFLSSITY | SEQ ID No 172 |
| TPQLFINYKLKSVAHLPWRM | SEQ ID No 173 |
| WRLKPSADCGPFRGLPLFIH | SEQ ID No 174 |
| NIPLLFYHLWRYFHRPADGSE | SEQ ID No 175 |
| SQVTKSSPEQSYQGDMYPTRG | SEQ ID No 176 |
| CCSALQKRCRKCFNKDSTEAT | SEQ ID No 177 |
| CQRLAARLGVVTGKDLGEVCH | SEQ ID No 178 |
| QVFRNISGKQSSLPAMSKVRR | SEQ ID No 179 |
| GGRREGESWNWAWVLSTRLARH | SEQ ID No 180 |
| YKMYGSEMLHKRDPLDEDEDTD | SEQ ID No 181 |
| HMYRERGGELLVHTGFLGSSQDR | SEQ ID No 182 |
| RKWCQYQKEIMERPPPFKPPPPP | SEQ ID No 183 |
| HNKRKIFLLVQSRKWRDGLCSKT | SEQ ID No 184 |
| RAARRRPEHLDTPDTPPRSQAQE | SEQ ID No 185 |
| NGTCFTAGRLIYVAGREGHMLKV | SEQ ID No 186 |
| DANYEMPGETLKVRYWPRDSWPVG | SEQ ID No 187 |
| ARSQMARNIWYFVVS | SEQ ID No 188 |
| LRKRRDSLSLSTQRTQGPAESARN | SEQ ID No 189 |
| DAASEIPEQGPVIKFWPNEKWAFIG | SEQ ID No 190 |
| WGYKNYREQRQLPQGDYVKKPGDGD | SEQ ID No 191 |
| TSYYSFVSHLRKIRTCTSIMEKD | SEQ ID No 192 |
| LIVRALIYKDLDNSPLRRK | SEQ ID No 193 |
| DHWALTQRTARAVSPQSTKPMAES | SEQ ID No 194 |
| HHNKRKIIAFVLEGKRSKVTRRPKA | SEQ ID No 195 |
| EWKSPFGLTPKGRNRSKVFSFSSALN | SEQ ID No 196 |
| YFLGRLVPRGRGAAEAATRKQRITETE | SEQ ID No 197 |
| QATACRTCHRQQQPAACRGFARVARTIL | SEQ ID No 198 |
| NKFSKYYQKQKDIDVDQCSEDAPEKCHE | SEQ ID No 199 |
| SKCSREVLWHCHLCPSSTEHASASANGH | SEQ ID No 200 |
| DMGSSDGETTHDSQITQEAVPKSLGASE | SEQ ID No 201 |
| CSRAARGTIGARRTGQPLKEDPSAVPVFS | SEQ ID No 202 |
| SVQKLSEFLSSAEIREEQCAPHEPTPQGPA | SEQ ID No 203 |
| KCYKIEIMLFYRNHFGAEELDGDNKDYDAY | SEQ ID No 204 |
| KCYNIELMLFYRQHFGADETNDDNKEYDAY | SEQ ID No 205 |
| GWKLRSYKTLFDAAETMVSLQLGIFNYEEV | SEQ ID No 206 |
| SSFSSCKDVTAEENNEAKNLQLAVARIKKG | SEQ ID No 207 |
| MRTKAAGCAERRPLQPRTEAAAAPAGRAMP | SEQ ID No 208 |
| RKRWQNEKLGLDAGDEYEDENLYEGLNLDDC | SEQ ID No 209 |
| MASHEVDNAELGSASAHGTPGSEAGPEELNT | SEQ ID No 210 |
| NGHPTSNAALFFIERRPHHWPAMKFRSHPDH | SEQ ID No 211 |
| ALLNNIIEIRLDAKKFVTELRRPVAVRAKDIG | SEQ ID No 212 |
| PETKGQSLAEIDQQFQKRRFTLSFGHRQNSTG | SEQ ID No 213 |
| PETKGKKLEEIESLFDNRLCTCGTSDSDEGRY | SEQ ID No 214 |
| YNLMSQKFRAAFRKLCNCKQKPTEKPANYSVA | SEQ ID No 215 |
| NYIFFGRGPQRQKKAAEKAASANNEKMRLDVNK | SEQ ID No 216 |
| DLNESANSTAQYASNAWFAAASSEPEEGISVFE | SEQ ID No 217 |
| DLNESANSTAQYASNAWFAAASSEPEEGISVFE | SEQ ID No 218 |
| SYQQKKFCFSIQQGLNADYVKGENLEAVVCEEPQ | SEQ ID No 219 |
| MDGSGERSLPEPGSQSSAASDDIEIVVNVGGVRQ | SEQ ID No 220 |
| RWCSKKKDAAVMNQEPAGHRTVNREDSDEQDPQE | SEQ ID No 221 |
| MFCSEKKLREVERIVKANDREYNEKFQYADNRIHT | SEQ ID No 222 |
| TQFSETKQRESQLMREQRVRFLSNASTLASFSEPG | SEQ ID No 223 |
| NWLNPPRLQMGSMTSTTLYNSMWFVYGSFVQQGGE | SEQ ID No 224 |
| CFYIKKINPLKEKSIILPKSLISVVRSATLETKPE | SEQ ID No 225 |
| HRWCANKKNAVVMDQEPAGNRTVNREDSDEQDPQE | SEQ ID No 226 |
| NYYSSCRKPTTTKKTTSLLHPDSSRWIPERISLQAP | SEQ ID No 227 |
| HLTALFLTVYEWRSPYGLTPRGRNRSTVFSYSSALN | SEQ ID No 228 |
| YFFIRTLQAHHDRSERESPFSGSSRQPDSLSSIENA | SEQ ID No 229 |
| LHCCCSNKKNAAVMDQEPAGDRTVNREDSDDQDPQE | SEQ ID No 230 |
| HYLRFQRKSIDGSFGSNDGSGNMVASHPIAASTPEG | SEQ ID No 231 |
| RWWNQYENLPWPDRLMSLVSGFVEGKDEQGRLLRRTL | SEQ ID No 232 |
| DVDVDDTTEEQGYGMAYTVHKWSELSWASHWVTFGCW | SEQ ID No 233 |
| RYCWLRRQAALQRRLSAMEKGKLHKPGKDASKRGRQTP | SEQ ID No 234 |
| MKKAEMGRFSISPDEDSSSYSSNSDFNYSYPTKQAALK | SEQ ID No 235 |
| LKCLIVALPKIILAVKSKGKFYLVIEELSQLFRSLVPIQ | SEQ ID No 236 |
| ETLLNAPRAMGTSSSPPSPASVVAPGTTLFEESRLPVFT | SEQ ID No 237 |
| YVRSWRKAGPLPSQIPPTAPGGEQCPLYANVHHQKGKDEG | SEQ ID No 238 |
| TYLSEPLVRGYTTAAAVQVFVSQLKYVFGLHLSSHSGPLS | SEQ ID No 239 |
| RWWSQYTSIPLPDQLMCVISASVHGVDQRGRLLRRTL | SEQ ID No 240 |
| RRFRQACLETCARCCPRPPRARPRALPDEDPPTPSIASLSR | SEQ ID No 241 |
| MAEAITYADLRFVKAPLKKSISSRLGQDPGADDDGE | SEQ ID No 242 |
| MQTSEREGSGPELSPSVMPEAPLESPPFPTKSPAFDLFNLV | SEQ ID No 243 |
| SKEKQFRGLQSRIEQEQKFTVIRGGQVIQIPVADITVGDIAQ | SEQ ID No 244 |
| SKEKQFRGLQSRIEQEQKFTVVRAGQVVQIPVAEIVVGDIAQ | SEQ ID No 245 |
| SKEKQFRGLQCRIEQEQKFSIIRNGQLIQLPVAEIVVGDIAQ | SEQ ID No 246 |
| KCLQGNADGDGGGGQCCRRQDSPSPDFYKQSSPNLQVSSDGT | SEQ ID No 247 |
| SSECQRYVYSILCCKESSDPSSYNSSGQLMASKMDTCSSNLNN | SEQ ID No 248 |
| MDNQGVIYSDLNLPPNPKRQQRKPKGNKNSILATEQE | SEQ ID No 249 |
| WWGDIWWKTMMELRSLDTQKATCHLQQVTDLPWTSVSSPVERE | SEQ ID No 250 |
| RLLFSKTYKLQERSDLTVKEKEELIEEWQPEPLVPPVPKDHPA | SEQ ID No 251 |
| KYYPINMDFKPNFITTYKCECVAPDTVNTTVFNASAPLAPDTNA | SEQ ID No 252 |
| CIRRSCLHRRRTFTYQSGSGEETILQFSSGTLTLTRRPKLQPEP | SEQ ID No 253 |
| MTNPSDRVLPANSMAESREGDFGCTVMELRKLMELRSRDALTQIN | SEQ ID No 254 |
| WLHRRLPPQPIRPLPRFAPLVKTEPQRPVKEEEPKIPGDLDQEPS | SEQ ID No 255 |
| WCQCCPHTCCCYVRCPCCPDKCCCPEALYAAGKAATSGVPSIYAP | SEQ ID No 256 |
| AVCQCRRKNYGQLDIFPARDTYHPMSEYPTYHTHGRYVPPSSTDR | SEQ ID No 257 |
| TVVLRVQFPSWNGLGSIPSTDIYKSTKNYKNIEEPQGVKILRFSSP | SEQ ID No 258 |
| DNTVPGSPEERGLIQWKAGAHANSDMSSSLKSYDFPIGMGIVKRITF | SEQ ID No 259 |
| YRCSQHSSSSEESTKRTSHSKLPEQEAAEADLSNMERVSLSTADPQG | SEQ ID No 260 |
| GLKGIRSALKRPVEQPLGEIPEKSLHSIAVSSIQKAKGYQLLEEEKIV | SEQ ID No 261 |
| RWRRRKGQQRTKATTPAREPFQNTEEPYENIRNEGQNTDPKLNPKDDG | SEQ ID No 262 |
| RFTGHPGAYLRLINRWRLEECHPSGCLIDLCMQMGIIMVLKQTWNNFME | SEQ ID No 263 |
| VVALIYCRKKRISALPGYPECREMGETLPEKPANPTNPDEADKVGAENT | SEQ ID No 264 |
| SYRYVTKPPAPPNSLNVQRVLTFQPLRFIQEHVLIPVFDLSGPSSLAQP | SEQ ID No 265 |
| SNKCDVVVVGGGISGMAAAKLLHDSGLNVVVLEARDRVGGRTYTLRNQK | SEQ ID No 266 |
| TLRNATQQKDMVEVADFDFSPMSDKNPEPPSGVRCCCQMCCGPFLLE | SEQ ID No 267 |
| TP | |
| HRQNQIKQGPPRSKDEEQKPQQRPDLAVDVLERTADKATVNGLPEKDR | SEQ ID No 268 |
| ETDTSALAAGSSQE | |
| MDEEEDGAGAEESGQPRSFMRLNDLSGAGGRPGPGSAEKDPGSADSE | SEQ ID No 269 |
| AEG | |
| EMLHLGFGTIRDSLNSKRRELEDPGAYNYPFTWNTPSAPPGYNIAVKPDQ | SEQ ID No 270 |
| AKTGRTSIQRDLKEQQPQALAPGRGPSHSSAFSMSPLSTAQAPLPNPRT | SEQ ID No 271 |
| AA | |
| LCLRKQSNGREAEYSDKHGQYLIGHGTKVYIDPFTYEDPNEAVREFAKEID | SEQ ID No 272 |
| KNFRRDFFILLSKCGCYEMQAQIYRTETSSTVHNTHPRNGHCSSAPRVT | SEQ ID No 273 |
| NG | |
| QDIGYFLKVAAVGRRVRSYGKRRPARTILRAFLEKARQTPHKPFLLFRDET | SEQ ID No 274 |
| MSAARPQFSIDDAFELSLEDGGPGPESSGVARFGPLHFERRARFEVAD | SEQ ID No 275 |
| EDKQSR | |
| YAATSRQLKRLESVSRSPIYSHFSETVTGASVIRAYNRSRDFEIISDTKVD | SEQ ID No 276 |
| ANQR | |
| MTVPKEMPEKWARAQAPPSWSRKKPSWGTEEERRARANDREYNEKF | SEQ ID No 277 |
| QYASNCIKT | |
| KTHRRKAARTAVGRNDTHPTTGSASPKHQKKSKLHGPTETSSCSGAAP | SEQ ID No 278 |
| TVEMDEE | |
| KARRKQAAGRPEKMDDEDPIMGTITSGSRKKPWPDSPGDQASPPGDA | SEQ ID No 279 |
| PPLEEQKE | |
| RVKTRRKKAAQPVQNTDDVNPVMVSGSRGHQHQFQTGIVSDHPAEAG | SEQ ID No 280 |
| PISEDEQE | |
| MKFEEKCGDNGSIVGRNQSYPGEKHQPKGKPIANGEAEVYAKQEANGK | SEQ ID No 281 |
| CSTPRKSL | |
| DIKINQYIIKKCSPCCACLAKAMERSEQQPLMGWEDEGQPFIRRQSRTD | SEQ ID No 282 |
| SGIFYED | |
| MAEPQAESEPLLGGARGGGGDWPAGLTTYRSIQVGPGAAARWDLCID | SEQ ID No 283 |
| QAVVFIEDA | |
| AVTISLAYSVKKMMKDNNLVRHLDACETMGNATAICSDKTGTLTTNRMT | SEQ ID No 284 |
| VVQAYVGD | |
| AVTISLAYSVKKMMKDNNLVRHLDACETMGNATAICSDKTGTLTMNRMT | SEQ ID No 285 |
| VVQAYIGG | |
| SNMKSRSAGKLWELQHEIEVYRKTVIAQWRALDLDVVLTPMLAPALDLN | SEQ ID No 286 |
| APGRATGA | |
| HPELNVQKRKRSFKAVVTAATMSSRLSHKPSDRPNGEAKTELCENVDP | SEQ ID No 287 |
| NSPAAKKKY | |
| RKSNFIFDKLHKVGIKTRRQWRRSQFCDINILAMFCNENRDHIKSLNRLD | SEQ ID No 288 |
| FITNESD | |
| KICRKEARKRAAAEQDVPSTLGPISQGHQHECSAGSSQDHPPPGAATY | SEQ ID No 289 |
| TPGKGEEQE | |
| SGKTLESWRSLCTRCCWASKGAAVGGGAGATAAGGGGGPGGGGGG | SEQ ID No 290 |
| GPGGGGGPGGGGG | |
| RSCRKKSARPAADVGDIGMKDANTIRGSASQGNLTESWADDNPRHHGL | SEQ ID No 291 |
| AAHSSGEERE | |
| MKSKMRQALGFAKEARESPDTQALLTCAEKEEENQENLDWVPLTTLSH | SEQ ID No 292 |
| CKSLRTMTAI | |
| AILFAVVARGTTILAKHAWCGGNFLEVTEQILAKIPSENNKLTYSHGNYLF | SEQ ID No 293 |
| HYICQDR | |
| MDHAEENEILAATQRYYVERPIFSHPVLQERLHTKDKVPDSIADKLKQAF | SEQ ID No 294 |
| TCTPKKIRN | |
| KKLVKKFRQKKQRQWIGPTGMNQNMSFHRNHTATVRSHAENPTASHV | SEQ ID No 295 |
| DNEYSQPPRNSHL | |
| MPRRLQPRGAGTKGPPAPAPAASGAARNSHSAASRDPPASAKPLLRW | SEQ ID No 296 |
| DEVPDDFVECFIL | |
| RSCRKKSARPAVGVGDTGMEDANAVRGSASQGPLIESPADDSPPHHAP | SEQ ID No 297 |
| PALATPSPEEGE | |
| DNFEYLTRDSSILGPHHLDEFIRVWAEYDPAACGRISYNDMFEMLKHMS | SEQ ID No 298 |
| PPLGLGKKCPAR | |
| SKRWTHLPCGCIINCRQNAYAVASDGKKIKRKGFEFNLSFQKSYGIYKIA | SEQ ID No 299 |
| HEDYYDDDENS | |
| NFNYFYHRETEGEEQSQYMHVGSCQHLSSSAEELRKARSNSTLSK | SEQ ID No 300 |
| VRSCRKKSARPAAGVGDTGIEDANAVRGSASQGPLTEPWAEDSPPDQP | SEQ ID No 301 |
| PPASARSSVGEGE | |
| LKLANEETIKNITHWTLFNYYNSSGWNESVPRPPLHPADVPRGSCWETA | SEQ ID No 302 |
| VGIEFMRLTVSDML | |
| MCHSRSCHPTMTILQAPTPAPSTIPGPRRGSGPEIFTFDPLPEPAAAPAG | SEQ ID No 303 |
| RPSASRGHRKRSRR | |
| ASSAASSEHFEKLHEIFRGLHEDLQGVPERLLGTAGTEEKKKLIRDFDEK | SEQ ID No 304 |
| QQEANETLAEMEEE | |
| MADQIPLYPVRSAAAAAANRKRAAYYSAAGPRPGADRHSRYQLEDESA | SEQ ID No 305 |
| HLDEMPLMMSEEGFENEE | |
| SMILSASVIRVRDGLPLSASTDYEQSTGMQECRKYFKMLSRKLAQLPDR | SEQ ID No 306 |
| CTLKTGHYNINFISSLG | |
| LTRKKKALRIHSVEGDLRRKSAGQEEWSPSAPSPPGSCVQAEAAPAGL | SEQ ID No 307 |
| CGEQRGEDCAELHDYFNV | |
| TIPTSRLKFLKEAGRLTQKEEIPEEELNEDVEEIDHAERELRRGQILWFRG | SEQ ID No 308 |
| LNRIQTQIRVVKAFRS | |
| TIPTSQLKCLKEAGHGPGKDEMTDEELAEGEEEIDHAERELRRGQILWF | SEQ ID No 309 |
| RGLNRIQTQIRVVKAFRS | |
| KCYFLRKAKAKQMPVEMSRPAVPLLNSNNEKMSDPNMEANSHYGHND | SEQ ID No 310 |
| DVRNHAMKPINDNKEPLNSD | |
| MGDTHWRVAQERDELWRAQVVATTVMLERKLPRCLWPRSGICGCEFG | SEQ ID No 311 |
| LGDRWFLRVENHNDQNPLRV | |
| YSPGDYICKKGDIGREMYIIKEGKLAVVADDGVTQFVVLSDGSYFGEISIL | SEQ ID No 312 |
| NIKGSKAGNRRTANIKS | |
| FSPGDYICRKGDIGKEMYIIKEGKLAVVADDGVTQYALLSAGSCFGEISIL | SEQ ID No 313 |
| NIKGSKMGNRRTANIRS | |
| CLKIIKEYERAVVFRLGRIQADKAKGPGLILVLPCIDVFVKVDLRTVTCNIP | SEQ ID No 314 |
| PQEILTRDSVTTQVDG | |
| MTEGARAADEVRVPLGAPPPGPAALVGASPESPGAPGREAERGSELGV | SEQ ID No 315 |
| SPSESPAAERGAELGADEEQR | |
| VRLRLQKHRPPADPCRGETETMNNLANCQREKDISVSIIGATQIKNTNKK | SEQ ID No 316 |
| ADFHGDHSADKNGFKARYPA | |
| VITTCLALGTRRMAKKNAIVRSLPSVETLGCTSVICSDKTGTLTTNQMSV | SEQ ID No 317 |
| CRMFILDRVEGDTCSLNEFTITG | |
| MEAVLNELVSVEDLLKFEKKFQSEKAAGSVSKSTQFEYAWCLVRSKYND | SEQ ID No 318 |
| DIRKGIVLLEELLPKGSKEEQRDY | |
| TRPKPLKPPCDLSMQSVEVAGSGGARRSALLDSDEPLVYFYDDVTTLYE | SEQ ID No 319 |
| GFQRGIQVSNNGPCLGSRKPDQPYEW | |
| HRPKALQPPCNLLMQSEEVEDSGGARRSVIGSGPQLLTHYYDDARTMY | SEQ ID No 320 |
| QVFRRGLSISGNGPCLGFRKPKQPYQW | |
| RRHQGKQNELSDTAGREINLVDAHLKSEQTEASTRQNSQVLLSETGIYD | SEQ ID No 321 |
| NDPDLCFRMQEGSEVYSNPCLEENKPG | |
| WSCERYRADVRTVWEQCVAIMSEEDGDDDGGCDDYAEGRVCKVRFD | SEQ ID No 322 |
| ANGATGPGSRDPAQVKLLPGRHMLFPPLER | |
| GPLVRYLDVKKTNKKESINEELHIRLMDHLKAGIEDVCGHWSHYQVRDK | SEQ ID No 323 |
| FKKFDHRYLRKILIRKNLPKSSIV | |
| KYPTLLHQRKKQRFLSKHISHRGGAGENLENTMAAFQHAVKIGTDMLEL | SEQ ID No 324 |
| DCHITKDEQVVVSHDENLKRATGVNVNISD | |
| AHDHYTVDVVVAYYITTRLFWWYHTMANQQVLKEASQMNLLARVWWY | SEQ ID No 325 |
| RPFQYFEKNVQGIVPRSYHWPFPWPVVHLSRQ | |
| SKASRAPRAHRDINVPRALVDILRHQAGPGTRPDRARSSSLTPGIGGPD | SEQ ID No 326 |
| SMPPRTPKNLYNTVKTPNLDWRALPPPSPS | |
| FKVYKWKQSRDLYRAPVSSLYRTPGPSLHADAVRGGLMSPHLYHQVYL | SEQ ID No 327 |
| TTDSRRSDPLLKKPGAASPLASRQNTLRSCDP | |
| MLCRKTSQQEHVYEAARAHAREANDSGETMRVAIFASGCSSDEPTSQN | SEQ ID No 328 |
| LGNNYSDEPCIGQEYQIIAQINGNYARLLDTVP | |
| KQKNEHHHGHSHYASESLPSKKDQEEGVMEKLQNGDLDHMIPQHCSS | SEQ ID No 329 |
| ELDGKAPMVDEKVIVGSLSVQDLQASQSACYWLKG | |
| HKALMERALRATFREALSSLHSRRRLDTEKKHQEHLLLSILPAYLAREMK | SEQ ID No 330 |
| AEIMARLQAGQGSRPESTNNFHSLYVKRHQGVS | |
| HKHQMQDASRDLFTYTVKCIQIRRKLRIEKRQQENLLLSVLPAHISMGMK | SEQ ID No 331 |
| LAIIERLKEHGDRRCMPDNNFHSLYVKRHQNVS | |
| ERFVAKPCAIALNIQANGPQIAPPNAILEKVFTAITKHPDEKRLEGLSKQLD | SEQ ID No 332 |
| WDVRSIQRWFRQRRNQEKPSTLTRFCESMWRF | |
| AWRLWRCRVARSRELNKPWAAQDGPKPGLGLQPRYGSRSAPKPQVA | SEQ ID No 333 |
| VPSCPSTPDYENMFVGQPAAEHQWDEQGAHPSEDNDFY | |
| HLSQWTRGRSRSHPGQGRSGESVEEVPLYGNLHYLQTGRLSQDPEPD | SEQ ID No 334 |
| QQDPTLGGPARAAEEVMCYTSLQLRPPQGRIPGPGTP | |
| KKRHCGYSKAFQDSDEEKMHYQNGQAPPPVFLPLHHPPGKLPEPQFYA | SEQ ID No 335 |
| EPHTYEEPGRAGRSFTREIEASRIHIEKIIGSGDSGE | |
| QSVFNKRKSRVRHYLVKCPQNSSGETVTSVTSLAPLQPKKGKRQKEKP | SEQ ID No 336 |
| DIPPAVPAKAPIAPTFHKPKLLKPQRKVTLPKIAEEN | |
| MASPGAGRAPPELPERNCGYREVEYWDQRYQGAADSAPYDWFGDFS | SEQ ID No 337 |
| SFRALLEPELRPEDRILVLGCGNSALSYELFLGGFPNVTS | |
| MPHFTVVPVDGPRRGDYDNLEGLSWVDYGERAELDDSDGHGNHRESS | SEQ ID No 338 |
| PFLSPLEASRGIDYYDRNLALFEEELDIRPKVSSLLGKL | |
| AIPTRSLKFLKEAGHGTTKEEITKDAEGLDEIDHAEMELRRGQILWFRGL | SEQ ID No 339 |
| NRIQTQIDVINTFQTGASFKGVLRRQNMGQHLDVKLVPS | |
| IFMKTAQAHRRAETLIFSKHAVIALRHGRLCFMLRVGDLRKSMIISATIHM | SEQ ID No 340 |
| QVVRKTTSPEGEVVPLHQVDIPMENGVGGNSIFLVAPL | |
| SWKRYPASMKQLQQRSLMRRHRKKKRQSLKQMTPSTQEFYVDYKPTN | SEQ ID No 341 |
| TETSEMLLNGTGPCTYNKSGSRECEIPLSMNVSTFLAYDQPT | |
| MANVSKKVSWSGRDRDDEEAAPLLRRTARPGGGTPLLNGAGPGAARQ | SEQ ID No 342 |
| SPRSALFRVGHMSSVELDDELLDPDMDPPHPFPKEIPHNEKLLS | |
| RLFKRRQGRIFPEGSCLNTFTKNPYAASKKTIYTYIMASRNTQPAESRIYD | SEQ ID No 343 |
| EILQSKVLPSKEEPVNTVYSEVQFADKMGKASTQDSKPPGT | |
| AMCLWKNRQQNTIQKYDPPGYLYQGSDMNGQMVDYTTLSGASQINGN | SEQ ID No 344 |
| VHGGFLTNGGLS | |
| LGSGFALKVQEQHRQKHFEKRRMPAANLIQAAWRLYSTDMSRAYLTAT | SEQ ID No 345 |
| WYYYDSILPSFRELALLFEHVQRARNGGLRPLEVRRAPVPDGAP | |
| MSSHKGSVVAQGNGAPASNREADTVELAELGPLLEEKGKRVIANPPKAE | SEQ ID No 346 |
| EEQTCPVPQEEEEEVRVLTLPLQAHHAMEKMEEFVYKVWEGRWRV | |
| WRMMKYQQKAAGMSPEQVLQPLEGDLCYADLTLQLAGTSPQKATTKLS | SEQ ID No 347 |
| SAQVDQVEVEYVTMASLPKED | |
| HYARARRKPGGLSATGTSSHSPSECQEPSSSRPSRIDPQEPTHSKPLAP | SEQ ID No 348 |
| MELEPMYSNVNPGDSNPIYSQIWSIQHTKENSANCPMMHQEHEELT | |
| MAKRKQGNRLGVCGRFLSSRVSGMNPSSVVHHVSDSGPAAELPLDVP | SEQ ID No 349 |
| HIRLDSPPSFDNTTYTSLPLDSPSGKPSLPAPSSLPPLPPKVLVCSKP | |
| SPNRKNPLWPSVPDPAHSSLGSWVPTIMEEDAFQLPGLGTPPITKLTVL | SEQ ID No 350 |
| EEDEKKPVPWESHNSSETCGLPTLVQTYVLQGDPRAVSTQPQSQSGTS | |
| DQ | |
| KRVQETKFGNAFTEEDSELVVNYIAKKSFCRRAIELTLHSLGVSEELQNK | SEQ ID No 351 |
| LEDVVIDRNLLILGKILGEGEFGSVMEGNLKQEDGTSLKVAVKTMKLDNS | |
| SQREIEEFLSEAACMKDFSHPNVIRLLGVCIEMSSQGIPKPMVILPFMKY | |
| GDLHTY | |

TABLE 4
Examples of naturally occurring C-terminal flanking regions
of ITIM only intracellular domains (Table 4 comprises
SEQ ID No 352 to SEQ ID No 685)

| | |
|---|---|
| K | |
| I | |
| N | |
| R | |
| E | |
| S | |
| R | |
| G | |
| Q | |
| I | |
| A | |
| YA | |
| VQ | |
| QE | |
| MT | |
| SK | |
| AR | |
| AK | |
| RR | |
| QI | |
| QI | |
| LT | |
| VI | |
| VLT | |
| KVS | |
| ARS | |
| IFR | |
| TFL | |
| QGVQ | SEQ ID No 352 |
| FSVR | SEQ ID No 353 |
| YSSK | SEQ ID No 354 |
| PKTR | SEQ ID No 355 |
| VNDT | SEQ ID No 356 |
| GMQQ | SEQ ID No 357 |
| PDLL | SEQ ID No 358 |
| HKSL | SEQ ID No 359 |
| RQPLN | SEQ ID No 360 |
| RTPTN | SEQ ID No 361 |
| RNLTN | SEQ ID No 362 |
| TVFSP | SEQ ID No 363 |
| NRFMK | SEQ ID No 364 |
| LNAIA | SEQ ID No 365 |
| LFTML | SEQ ID No 366 |
| MYVMG | SEQ ID No 367 |
| VTGTR | SEQ ID No 368 |
| TTHRR | SEQ ID No 369 |
| VTRRK | SEQ ID No 370 |
| VTPVR | SEQ ID No 371 |
| MTVRK | SEQ ID No 372 |
| MTVKR | SEQ ID No 373 |
| VTPRR | SEQ ID No 374 |
| KPWWD | SEQ ID No 375 |
| NRLMK | SEQ ID No 376 |
| FKETV | SEQ ID No 377 |
| PFLKNT | SEQ ID No 378 |
| VTQRRG | SEQ ID No 379 |
| MTERKA | SEQ ID No 380 |
| VTMRRT | SEQ ID No 381 |
| RQALAE | SEQ ID No 382 |
| APDSNT | SEQ ID No 383 |
| SKKRGG | SEQ ID No 384 |
| EISAAS | SEQ ID No 385 |
| STLGPG | SEQ ID No 386 |
| NSLSFL | SEQ ID No 387 |
| AHLVQY | SEQ ID No 388 |
| DEHDAII | SEQ ID No 389 |
| VTKRCAR | SEQ ID No 390 |
| KRIEHAK | SEQ ID No 391 |
| VTPWRLR | SEQ ID No 392 |
| VTPCRLR | SEQ ID No 393 |
| RWGFSKQ | SEQ ID No 394 |
| RGDDKDC | SEQ ID No 395 |
| ATRMMMG | SEQ ID No 396 |
| GPSRDPD | SEQ ID No 397 |
| VTLPRARR | SEQ ID No 398 |
| RLPYQLAQ | SEQ ID No 399 |
| LGSFLIGS | SEQ ID No 400 |
| MGDDSSNS | SEQ ID No 401 |
| PLSHLAQN | SEQ ID No 402 |
| ATEGKSVC | SEQ ID No 403 |
| HNNCEKDSV | SEQ ID No 404 |
| RTMKPLPRH | SEQ ID No 405 |
| SQRRNPWQA | SEQ ID No 406 |
| YPMKITGNR | SEQ ID No 407 |
| VSHLRSPRK | SEQ ID No 408 |
| SYPARTRKV | SEQ ID No 409 |
| WGRLRFARK | SEQ ID No 410 |
| VFLNKVMRG | SEQ ID No 411 |
| SGSGYQLV | SEQ ID No 412 |
| HSDSLGSAS | SEQ ID No 413 |
| KATVHLAYL | SEQ ID No 414 |
| CAEDYHWQWR | SEQ ID No 415 |
| QRLLVKAKTQ | SEQ ID No 416 |
| EDFLEESRNQ | SEQ ID No 417 |
| GEKAFGWPGK | SEQ ID No 418 |
| PTVSPFLRQR | SEQ ID No 419 |
| PRTVLWLTIE | SEQ ID No 420 |
| EVCWKLPQSK | SEQ ID No 421 |
| ISNRWLSIGV | SEQ ID No 422 |
| GNCSFFTETG | SEQ ID No 423 |
| DSIRGYFGET | SEQ ID No 424 |
| LHSNSFIRNNY | SEQ ID No 425 |
| TYYSETTVTRT | SEQ ID No 426 |
| TYYSRRTLLGV | SEQ ID No 427 |
| SSYFLGKLLSD | SEQ ID No 428 |
| QARLRQHYQTI | SEQ ID No 429 |
| LVFHHMAQHLMM | SEQ ID No 430 |
| YSTKITIPVIKR | SEQ ID No 431 |
| TYHSERTVTFTY | SEQ ID No 432 |
| PGSNYSEGWHIS | SEQ ID No 433 |
| LCANKKSSVKIT | SEQ ID No 434 |
| DGSPDYQKAKLQ | SEQ ID No 435 |
| VRRQLPVEEPNP | SEQ ID No 436 |
| KLNQVVRKVSAL | SEQ ID No 437 |
| ILRDYKQSSSTL | SEQ ID No 438 |
| DPAKYARWKPWLK | SEQ ID No 439 |
| QLRFNKPVRYAAT | SEQ ID No 440 |
| ELRFNKCVRLCGT | SEQ ID No 441 |
| GLKDQVNTVGIPI | SEQ ID No 442 |
| YKTSQNALDFNTKV | SEQ ID No 443 |
| PSENKENSAVPVEE | SEQ ID No 444 |
| ARTKISDDDDEHTL | SEQ ID No 445 |
| PITKWLPAYKFKEY | SEQ ID No 446 |
| SNLDEVGQQVERLD | SEQ ID No 447 |
| RATASLNANEVEWF | SEQ ID No 448 |
| EMRFSRAVRLCGTLQ | SEQ ID No 449 |
| RICSLTASEGPQQKI | SEQ ID No 450 |
| PLSPYGDIIEK | SEQ ID No 451 |
| TSESKENCTGVQVAE | SEQ ID No 452 |
| SQMNPRSPPATMCSP | SEQ ID No 453 |
| MHPDALEEPDDQNRI | SEQ ID No 454 |
| LSRMQHQSQECKSEE | SEQ ID No 455 |
| QEPNESDLPYHEMETL | SEQ ID No 456 |
| SRENSSSQDPQTEGTR | SEQ ID No 457 |
| EPSGHEKEGFMEAEQC | SEQ ID No 458 |
| KGSNYHLSDNDASDVE | SEQ ID No 459 |
| HTQSAEPPPPPEPARI | SEQ ID No 460 |
| CLISEERNECVIATEV | SEQ ID No 461 |
| ASWATNLKSSIRKANK | SEQ ID No 462 |
| TSMQPTEAMGEEPSRAE | SEQ ID No 463 |
| LSQEHRLLRHSSMADKK | SEQ ID No 464 |
| YSQKPPKRASSQLSWFS | SEQ ID No 465 |
| PRRPGEPREVHIGRALGR | SEQ ID No 466 |
| DTLSTRPGYLWVVWIYRN | SEQ ID No 467 |
| SIMNADILNYCQKESWCK | SEQ ID No 468 |
| NRGPPLDRAEVYSSKLQD | SEQ ID No 469 |
| ISKLSHSKGHQKRKALKTT | SEQ ID No 470 |
| DQNVNEAMPSLKITNDYIF | SEQ ID No 471 |
| DNSPLRRKSIYLVIIV | SEQ ID No 472 |
| QGQRSDVYSDLNTQRPYYK | SEQ ID No 473 |
| EIYLEPLKDAGDGVRYLLR | SEQ ID No 474 |
| LKHDTNIYCRMDHKAEVAS | SEQ ID No 475 |
| QWPALKEKYPKSVYLGRIV | SEQ ID No 476 |
| GKIFSSCFHNTILCMQKESE | SEQ ID No 477 |
| LDDHDYGSWGNYNNPLYDDS | SEQ ID No 478 |
| VRENHGLLPPLYKSVKTYTV | SEQ ID No 479 |
| PCTAQECLASVLKPTNETLN | SEQ ID No 480 |
| PNCNKPRWEKWFMVTFASST | SEQ ID No 481 |
| GYKAFGLVGKLAASGSITMQN | SEQ ID No 482 |
| FGRTVAIKPPKCWTGRFLMNL | SEQ ID No 483 |
| FRRTVSSKTPKCPTGRLLMNL | SEQ ID No 484 |
| NFHGMNPSKDTSTEYSEVRTQ | SEQ ID No 485 |
| HNPTLQVFRKTALLGANGAQP | SEQ ID No 486 |
| GELSLASLHIPFVETQHQTQV | SEQ ID No 487 |
| GEEGVALPANGAGGPGGASARK | SEQ ID No 488 |
| DRRSNQVARALHDHLGLRQGDC | SEQ ID No 489 |
| NHRVDASSMWLYRRYYSNVCQR | SEQ ID No 490 |
| QKMDSLDAMEGDVELEWEETTM | SEQ ID No 491 |
| FHTLRGKGQAAEPPDFNPRDSYS | SEQ ID No 492 |
| SVYQYGSALAHFFYSSDQAWYDR | SEQ ID No 493 |
| DSAEAPADPFAVPEGRSQDARGY | SEQ ID No 494 |
| SAGNGGSSLSYTNPAVAATSANL | SEQ ID No 495 |
| KAKLQSSPDYLQVLEEQTALNKI | SEQ ID No 496 |
| LLKGLGRRQACGYCVFWLLNPLPM | SEQ ID No 497 |
| SRGLQGTYQDVGSLNIGDVQLEKP | SEQ ID No 498 |
| APVVFFYLSQDSRPRSWCLRTVCN | SEQ ID No 499 |
| HFHKVQPQEPKVTDTEYSEIKIHK | SEQ ID No 500 |
| SISLHGLSQVSEDPPSVFNMPEAD | SEQ ID No 501 |
| VNNCEHFVTLLRYGEGVSEQANRA | SEQ ID No 502 |
| QNWGPRFKKLADLYGSKDTFDDDS | SEQ ID No 503 |
| KLRSDCSRPSLQWYTRAQSKMRRPS | SEQ ID No 504 |
| DHSRSTKAVSEKKAKGLGESRKDKK | SEQ ID No 505 |
| STGLTWRSGTASSVSYPKQMPLSQV | SEQ ID No 506 |
| AATVFFCLGQTTRPRSWCLRLVCNP | SEQ ID No 507 |
| YAANPVITPEPVTSPPSYSSEIQANK | SEQ ID No 508 |
| NHCVFTQRKITRPSQRPKTPPTDTSV | SEQ ID No 509 |
| TQGAKEHEEAESGEGTRRRAAEAPSM | SEQ ID No 510 |
| DHLALSRPRRLSTADPADASTIYAVVV | SEQ ID No 511 |
| STSALSEAASDTTQEPPGSHEYAALKV | SEQ ID No 512 |
| SFHKGEPQDLSGQEATNNEYSEIKIPK | SEQ ID No 513 |
| EGALHRSSMQPDNSSDSDYDLHGAQRL | SEQ ID No 514 |
| SFHKARPQYPQEQEAIGYEYSEINIPK | SEQ ID No 515 |
| SFQMVKPWDSRGQEATDTEYSEIKIHR | SEQ ID No 516 |
| IFPGGNKGGGTSCGPAQNPPNNQTPSS | SEQ ID No 517 |
| ELPTATQAQNDYGPQQKSSSSRPSCSCL | SEQ ID No 518 |
| KVPAEEPANELPMNEIEAWKAAEKKARW | SEQ ID No 519 |
| SHQWKSSEDNSKTFSASHNVEATSMFQL | SEQ ID No 520 |
| KEEEMADTSYGTVKAENIIMMETAQTSL | SEQ ID No 521 |
| NLTALDWSLLSKKECLSYGGRLLGNSCK | SEQ ID No 522 |
| SFSEMKSREPKDQEAPSTTEYSEIKTSK | SEQ ID No 523 |
| ELIKPHRAAKGAPTSTVYAQILFEENKL | SEQ ID No 524 |
| NHSVIGPNSRLARNVKEAPTEYASICVRS | SEQ ID No 525 |
| DLASQPVYCNLQSLGQAPMDEEEYVIPGH | SEQ ID No 526 |
| DYDNSENQLFLEEERRINHTAFRTVEIKR | SEQ ID No 527 |
| DHSGGHHSDKINKSESVVYADIRKN | SEQ ID No 528 |
| DHWALTQRTARAVSPQSTKPMAESITYAAVARH | SEQ ID No 529 |
| ENLIYENVAAIQAHKLEV | SEQ ID No 530 |
| SETTGLTPDQVKRNLEKYGLNELPAEEGKT | SEQ ID No 531 |
| SLCYKFLSYFRASSTMRY | SEQ ID No 532 |
| KLEKLVSSLREEDEYSIHPPSSRWKRFYRA | SEQ ID No 533 |
| SHLRKIRTCTSIMEKDLTYSSVKRHL | SEQ ID No 534 |
| ALSSSTSPRAPPSHRPLKSPQNETLYSVLKA | SEQ ID No 535 |
| DPENQNFLLESNLGKKKYETEFHPGTTSFGMS | SEQ ID No 536 |
| FTYGVRFLKKTPWLWNTRHCWYNYPYQPLTTD | SEQ ID No 537 |
| KTLRSLEATDSAFDNPDYWHSRLFPKANAQRT | SEQ ID No 538 |
| QFQNSSEMEKIPEIGKFGEKAPPAPSHVWRPAA | SEQ ID No 539 |
| TFQDSAGARNNRDGNNLRKRGHPAPSPIWRHAA | SEQ ID No 540 |
| LALSSGSRKASAVGDVVNLVSVDVQRLTESVLY | SEQ ID No 541 |
| DILRPYFDVEPAQVRSRLLESMIPIKMVNFPQK | SEQ ID No 542 |
| TCQFEGLLRPYIQHAMYDEEKGTPIFICPVSWG | SEQ ID No 543 |
| LQLDKVDVIPVTAINLYPDGPEKRAENLEDKTCI | SEQ ID No 544 |
| CPVFKGFSSSSKDQIAIPEDTPENTETASVCTKV | SEQ ID No 545 |
| NFEAQQPTQPTSASPSLTATEIIYSEVKKQ | SEQ ID No 546 |
| WSMQQPESSANIRTLLENKDSQVIYSSVKKS | SEQ ID No 547 |
| GRQPGKREPLRSVLRRALGEGAELGARGQSLPMGLL | SEQ ID No 548 |
| PDWLKDNDYLLHGHRPPMPSFRACFKSIFRIHTETG | SEQ ID No 549 |
| DGSHIHTFLDVSFSEALYPVFRILTLEPTALTICPA | SEQ ID No 550 |
| DHWALTQRTARAVSPQSTKPMAESITYAAVARH | SEQ ID No 551 |
| HSLTLRREATEPPPSQEREPPAEPSIYAPLAIH | SEQ ID No 552 |
| RFKNEFKSSGINTASSAASKERTAPHKSNTGFPKLLCA | SEQ ID No 553 |
| REKMWHGRQRLGGVGAGSRPPMPAHPTPASIFSARSTDV | SEQ ID No 554 |
| KKTHPDDSAGEASSRGRAHEEDDEENYENVPRVLLASDH | SEQ ID No 555 |
| GSAQGRRLPLRLVLQRALGDEAELGAVRETSRRGLVDIAA | SEQ ID No 556 |
| SSPTSPTSPGPQQAPPRETYLSEKIPIPDTKPGTFSLRKL | SEQ ID No 557 |
| AGFPKTRLGRLATSTSRSRQLSLCDDYEEQTDEYFFDRDP | SEQ ID No 558 |
| KSLMARRTYLEWPKEKSKRGLFWANLRAAINIKLTEQAKK | SEQ ID No 559 |
| LPWEPSLESEEEVEEEETSEALVLNPRRHQDSSRNKAGGLP | SEQ ID No 560 |
| KESDHFSTELDDITVTDTYLSATKVSFDDTCLASEVSFSQS | SEQ ID No 561 |
| QNLCSRLKTSPVEGLSGNPADLEKRRQVFGHNVIPPKKPKT | SEQ ID No 562 |
| NHCVFTQRKITRPSQRPKTPPTDIIVYTELPNAEP | SEQ ID No 563 |
| TMKTSDKFKFVFREKMGRIVDYFTIQNPSNVDH | SEQ ID No 564 |
| SENFRKAYKQVFKCHIRKDSHLSDTKESKSRIDTPPSTNCTHV | SEQ ID No 565 |
| EFMNEQKLNRYPASSLVVVRSKTEDHEEAGPLPTKVNLAHSEI | SEQ ID No 566 |
| GNYRLKEYEKALKYVRGLLQTEPQNNQAKELERLIDKAMKKDG | SEQ ID No 567 |
| PAGEEDEEEEEDLGWGCPDVAGPTRPTAPPDLHNYMRRIKEIA | SEQ ID No 568 |
| SGLREQTIAIKCLVVLVVALGLPFLAIGYWIAPCSRLGKILRS | SEQ ID No 569 |
| SGLRQQTMAVKFLVVLAVAIGLPFLALIYWFAPCSKMGKIMRG | SEQ ID No 570 |
| SGLRQQTMAVKFLVVLAVAIGLPFLALIYWFAPCSKMGKIMRG | SEQ ID No 571 |
| PPVSRAYTTACVLTTAAVQLELITPFQLYFNPELIFKHFQIWRL | SEQ ID No 572 |
| GNVLILRSVSTAVYKRFPSAQHLVQAGFMTPAEHKQLEKLSLPH | SEQ ID No 573 |
| QNWWTRRKVRQEHGPERKISFPQWEKDYNLQPMNAYGLFDEYLE | SEQ ID No 574 |
| DSNIAFSVNASDKGEASCCDPVSAAFEGCLRRLFTRWGSFCVRNP | SEQ ID No 575 |
| QVSSAESHKDLGKKDTETVYSEVRKAVPDAVESRYSRTEGSLDGT | SEQ ID No 576 |
| VLDSEPKSQASGPEPELYASVCAQTRRARASFPDQAYANSQPAAS | SEQ ID No 577 |
| ETGINLRGALLAMIYNKILRLSTSNLSMGEMTLGQINNLVAIETNQ | SEQ ID No 578 |
| AAGRARAKACRAPGSYGRGTHCHYKAPTVVLHMTKTDPSLENPTHL | SEQ ID No 579 |
| HHELLSHKSFETNAQEDTMETHLETELDLSTITTAGRISDHKQQLA | SEQ ID No 580 |
| DQKYVLILNVFPAPPKRSFLPQVLTEWYIPLEKDERHQWIVLLSFQL | SEQ ID No 581 |
| LQTVYLGKNSEAQPARQILVLDNAAIVCNFGSELSLVYVPSVLEKLD | SEQ ID No 582 |
| RKDSEEEVSLLGSQDIEEGNHQVEDGCREMACEEFNFGEILMTQVIHS | SEQ ID No 583 |
| QRRETEVYACIENEDGSSPTAKQSPLSQERPHRFEDDGELNLVYENL | SEQ ID No 584 |
| APCAKVRPYIAEGESDTDSDLCTPCGPPPRSATGEGPFGDVGWAGPRK | SEQ ID No 585 |
| ERLGYSEDGLEELSRHSVSEADRLLSARSSVDFQAFGVKGGRRINEYFC | SEQ ID No 586 |
| RQRLCRQSVLLWPHQPSGQRSFWAQLGMALTRDNHHFYNRNFCQGP | SEQ ID No 587 |
| TAE | |
| LHRDYDRTVTLLSPPRPGRLPDLQEIGVPLYQSPPGRYLSPKKGANENV | SEQ ID No 588 |
| RSPFYDRFSEARILFLLQLLADHVPGVGLVTRPLMDYLPTWQKIYFYSWG | SEQ ID No 589 |
| NPSPDTRIELNDVVYLIRPDPLAYLPNSEPSRRNSICNVTGQDSREETQL | SEQ ID No 590 |
| RDIYAQRMHTFITSLSSVGIVVSDPDSTDASSIEDNEDICNTTSLENCTAK | SEQ ID No 591 |
| SFQGLRLWEPADQEAPSTTEYSEIKIHTGQPLRGPGFGLQLEREMSGM | SEQ ID No 592 |
| VPK | |
| LVSSVADVLAQGGGPRSSQHCGEGSQLVAADHRGGLDGWEQPGAGQ | SEQ ID No 593 |
| PPSDT | |
| VVSDSGISTDYSSGDSQGAQGGLSDGPYSNPYENSLIPAAEPLPPSYVA | SEQ ID No 594 |
| CS | |
| NPPPDTRLEPSDIVYLIRSDPLAHVASSSQSRKSSCSHKLSSCNPETRDE | SEQ ID No 595 |
| TQL | |
| HPSCCWKPDPDQVDGARSLLSPEGYQLPQNRRMTHLAQKFFPKAKDE | SEQ ID No 596 |
| AASPVKG | |
| GKKFKRYFLQLLKYIPPKAKSHSNLSTKMSTLSYRPSDNVSSSTKKPAPC | SEQ ID No 597 |
| FEVE | |
| SDNFKKSFQNVLCLVKVSGTDDGERSDSKQDKSRLNETTETQRTLLNG | SEQ ID No 598 |
| DLQTSI | |
| SPTNNTVYASVTHSNRETEIWTPRENDTITIYSTINHSKESKPTFSRATAL | SEQ ID No 599 |
| DNV | |
| LGGAAYVNTFHNIALETSDEHREFAMAATCISDTLGISLSGLLALPLHDFL | SEQ ID No 600 |
| CQLS | |
| MQKDSSQETTSCYEKIFYGHLLKKFRQPNFARKLC | SEQ ID No 601 |
| ALATSKALVKFDPEIIGPRDIIKIIEEIGFHASLAQRNPNAHHLDHKMEIKQ | SEQ ID No 602 |
| WKKS | |
| NHCVFTQRKITRPSQRPKTPPTDIIVYTELPNAESRSKVVSCP | SEQ ID No 603 |
| DHCVFTQRKITRPSQRPKTPPTDTILYTELPNAKPRSKVVSCP | SEQ ID No 604 |
| ERKRIQYLHAKLLKKRSKQPLGEVKRRLSLYLTKIHFWLPVLKMIRKKQM | SEQ ID No 605 |
| DMASADKS | |
| SEWLESIRMKRYILHFHSAGLDTMECVLELTAEDLTQMGITLPGHQKRIL | SEQ ID No 606 |
| CSIQGFKD | |
| NADAKYPGYPPEHIIAEKRRARRRLLHKDGSCNVYFKHIFGEWGSYVVDI | SEQ ID No 607 |
| FTTLVDTKW | |
| HRTSKRSEARSAEFTVGRKDSSIICAEVRCLQPSEVSSTEVNMRSRTLQ | SEQ ID No 608 |
| EPLSDCEEVLC | |
| IKYWFHTPPSIPLQIEEYLKDPTQPILEALDKDSSPKDDVWDSVSIISFPEK | SEQ ID No 609 |
| EQEDVLQTL | |
| RREPRQALAGTFRDLRLRLWPQGGGWVQQVALKQVGRRWVASNPRE | SEQ ID No 610 |
| SRPSTLLTNLDRGTPG | |
| DFQWREKTPEPPVPCVPEQTEYATIVFPSGMGTSSPARRGSADGPRSA | SEQ ID No 611 |
| QPLRPEDGHCSWPL | |
| ENDEDGAQASPEPDGGVGTRDSSRTSIRSSQWSFSTISSSTQRSYNTC | SEQ ID No 612 |
| CSWTQHPLIQKNRR | |
| DEIYLESCCQARYHQKKEQMNEELKREAETLREREGEEFDNTCCAEKR | SEQ ID No 613 |
| KKLWDLLEKPNSSV | |
| DMRPPPTAMITLNNSVYWQEFEDTCVYECLDGKDCQSFFCCYEECKSG | SEQ ID No 614 |
| SWRKGRIHIDILELDS | |
| GTLAWMITLSDGLHNFIDGLAIGASFTVSVFQGISTSVAILCEEFPHELGD | SEQ ID No 615 |
| FVILLNAGMSIQQ | |
| GHNEVIGVCRVGPDAADPHGREHWAEMLANPRKPVEHWHQLVEEKTV | SEQ ID No 616 |
| TSFTKGSKGLSEKENSE | |
| PSLSTSNKNIYEVEPTVSVVQEGCGHNSSYIQNAYDLPRNSHIPGHYDLL | SEQ ID No 617 |
| PVRQSPANGPSQDKQS | |
| DEARLERCCLRRLRRREEEAAEARAGPTERGAQGSPARALGPRGRLQ | SEQ ID No 618 |
| RGRRRLRDVVDNPHSGLAGK | |
| DELSIDSCCRDRYFRRKELSETLDFKKDTEDQESQHESEQDFSQGPCPT | SEQ ID No 619 |
| VRQKLWNILEKPGSSTAAR | |
| KETKVKELKRAKTVLTVIKWKGEKSKYPQGRFWKQLQVAMPVKKSPRR | SEQ ID No 620 |
| SSSDEQGLSYSSLKNV | |
| LSYNHHRLEEHEAETYEDGFTGNPSSLSQIPETNSEETTVIFEQLHSFVV | SEQ ID No 621 |
| DDDGFIEDKYIDIHELCEEN | |
| DESSSSPGRQMSSSDGGPPGQSDTDSSVEESDFDTMPDIESDKNIIRTK | SEQ ID No 622 |
| MFLYLSDLSRKDRRIVSKKYK | |
| RIIQEKKKHAVASDPRHLRNKGSPIIYSEVKVASTPVSGSLFLASSAPHR | SEQ ID No 623 |
| AEDHLDGCCKRRYLQKIEEFAEMVEREEEDDALDSEGRDSEGPAEGEG | SEQ ID No 624 |
| RLGRCMRRLRDMVERPHSGLPGK | |
| EDPWIGSESDKFILLGYLDQLRKDPALLSSEAVLPDLTDELAPVFLLRWF | SEQ ID No 625 |
| YSASDYISDCWDSIFHNNWRE | |
| MDRKWYFLCNSWLSINVGDCVLDKVFPVATEQDRKQFSHLFFMKTSAG | SEQ ID No 626 |
| FQDGHIWYSIFSRCARSSFTRVQR | |
| VPSDPSVEEMRKVVCEQKLRPNIPNRWQSCEALRVMAKIMRECWYAN | SEQ ID No 627 |
| GAARLTALRIKKTLSQLSQQEGIKM | |
| CSDFQEDIVFPFSLGWSSLVHRFLGPRNAQRVLLGLSEPIFQLPRSLAST | SEQ ID No 628 |
| PTAPTTPATPDNASQEELMITL | |
| RIPLLGDEEEGSEDEGESTHLLPENENELEKFIHSVIISKRSKNIKKKLKEE | SEQ ID No 629 |
| QNSVTENKTKNASHNGKMEDL | |
| SKIPQITLNFVDLKGDPFLASPTSDREIIAPKIKERTHNVTEKVTQVLSLGA | SEQ ID No 630 |
| DVLPEYKLQAPRIHRWTILHY | |
| DHCIFTQRKITGPSQRSKRPSTDTSVCIELPNAEPRALSPAHEHHSQALM | SEQ ID No 631 |
| GSSRETTALSQTQLASSNVPAAGI | |
| PRARIMQRKRGLEWFVCDGWKFLCTSCCGWLINICRRKKELKARTVWL | SEQ ID No 632 |
| GCPEKCEEKHPRNSIKNQKYNVFTFI | |
| SPRHYYSGYSSSPEYSSESTHKIWERFRPYKKHHREEVYMAAGHALRK | SEQ ID No 633 |
| KVQFAKDEDLHDILDYWKGVSAQQKL | |
| SPQYHSLSYSSSPEYTCRASQSIWERFRLSRRRHKEEEEFMAAGHALR | SEQ ID No 634 |
| KKVQFAKDEDLHDILDYWKGVSAQHKS | |
| MAFNAKVSDPLIGGTYMTLLNTVSNLGGNWPSTVALWLVDPLTVKECVG | SEQ ID No 635 |
| ASNQNCRTPDAVELCKKLGGSCVTALD | |
| YYPHGHSHSLGLDLNLGLGSGTFHSLGNALVHGGELEMGHGGTHGFG | SEQ ID No 636 |
| YGVGHGLSHIHGDGYGVNHGGHYGHGGGH | |
| SFHKVKPQDPQGQEATDSEYSEIKIHKRETAETQACLRNHNPSSKEVRG | SEQ ID No 637 |
| NNSTSANRNVYEVEPTVSVVQGVFSNNGRLSQDPYDLPKNSHIPCHYD | SEQ ID No 638 |
| LLPVRDSSSSPKQEDSGGSSSNSSSSSE | |
| RREFRKALKSLLWRIASPSITSMRPFTATTKPEHEDQGLQAPAPPHAAAE | SEQ ID No 639 |
| PDLLYYPPGVVVYSGGRYDLLPSSSAY | |
| NELFIDSCCSNRYQERKEENHEKDWDQKSHDVSTDSSFEESSLFEKELE | SEQ ID No 640 |
| KFDTLRFGQLRKKIWIRMENPAYCLSAK | |
| NEFFIDSCCSYSYHGRKVEPEQEKWDEQSDQESTTSSFDEILAFYNDAS | SEQ ID No 641 |
| KFDGQPLGNFRRQLWLALDNPGYSVLSR | |
| DATDQESLELKPTSRAGIKQKGLLLSSSLMHSESELDSDDAIFTWPDREK | SEQ ID No 642 |
| GKLLHGQNGSVPNGQTPLKARSPREEIL | |
| SRGASIPGTPPTAGRVVSLSPEDAPGPSLRRSGGCSPSSDTVFGPGAP | SEQ ID No 643 |
| AAAGAEACRRENRGTLYGTRSFTVSVAQKR | |
| NKTFSPAQRHGNSGITMMRKKAKFSLRENPVEETKGEAFSDGNIEVKLC | SEQ ID No 644 |
| EQTEEKKKLKRHLALFRSELAENSPLDSGH | |
| YESHRAGCEKYEGPYPQHPFYSSASGDVIGGLSREEIRQMYESSELSRE | SEQ ID No 645 |
| EIQERMRVLELYANDPEFAAFVREQQVEEV | |
| FKNSDKEDDQEHPSEKQPSGAESGTLARASLALPTSSLSRTASQSSSH | SEQ ID No 646 |
| RGWEILRQNTLGHLNLGLNLSEGDGEEVYHF | |
| QDLKGDDTAVRDAHSKRDTKCQPQGSSGEEKGTPTTLRGGEASERKR | SEQ ID No 647 |
| PDSGCSTSKDTKYQSVYVISEEKDECVIATEV | |
| DHCVFIQRKISRPSQRPKTPLTDTSVYTELPNAEPRSKVVSCPRAPQSGL | SEQ ID No 648 |
| EGVF | |
| RDLPPLSSSEMEEFLTQESKKHENEFNEEVALTEIYKYIVKYFDEILNKLE | SEQ ID No 649 |
| RERGLEEAQKQLLHVKVLFDEKKKCKWM | |
| LGSPTSPGPGHYLRCDSTQPLLAGLTPSPKSYENLWFQASPLGTLVTPA | SEQ ID No 650 |
| PSQEDDCVFGPLLNFPLLQGIRVHGMEALGSF | |
| LSQPGPTLPKTHVKTASLGLAGKARSPLLPVSVPTAPEVSEESHKPTED | SEQ ID No 651 |
| SANVYEQDDLSEQMASLEGLMKQLNAITGSAF | |
| ATECGQGEEKSEGPLGSQESESCGLRKEEKEPHADKDFCQEKQVAYC | SEQ ID No 652 |
| PSGKPEGLNYACLTHSGYGDGSD | |
| KELILAVDGVLSVHSLHIWSLTMNQVILSAHVATAASRDSQVVRREIAKAL | SEQ ID No 653 |
| SKSFTMHSLTIQMESPVDQDPDCLFCEDPCD | |
| TSFPRLPEDEPAPAAPLRGRKDEDAFLGDPDTDPDSFLKSARLQRLPSS | SEQ ID No 654 |
| SSEMGSQDGSPLRETRKDPFSAAAAECSCRQDG | |
| LEKERELQQLGITEYLRKNIAQLQPDMEAHYPGAHEELKLMETLMYSRP | SEQ ID No 655 |
| RKVLVEQTKNEYFELKANLHAEPDYLEVLEQQT | |
| KNSLKEANHDGDFGITLAELRALMELRSTDALRKIQESYGDVYGICTKLK | SEQ ID No 656 |
| TSPNEGLSGNPADLERREAVFGKNFIPPKKPKT | |
| YNCLDFPAGVVPVTTVTAEDEAQMEHYRGYFGDIWDKMLQKGMKKSV | SEQ ID No 657 |
| GLPVAVQCVALPWQEELCLRFMREVERLMTPEKQSS | |
| PAFDLLSRKMLGCPINDLNVILLFLRANISELISFSWLSVLCVLKDTTTQKH | SEQ ID No 658 |
| NIDTVVDFMTLLAGLEPSKPKHLTNSACDEHP | |
| SRRFQAAFQNVISSFHKQWHSQHDPQLPPAQRNIFLTECHFVELTEDIG | SEQ ID No 659 |
| PQFPCQSSMHNSHLPAALSSEQMSRTNYQSFHFNKT | |
| ELKTTRFHPNRQSSMYTVTRMESMTVVFDPNDADTTRSSRKKRATPRD | SEQ ID No 660 |
| PSFNGCSRRNSKSASATSSFISSPYTSVDEYS | |
| SRQCKQFAKDLLDQTRSSRELEIILNYRDDNSLIEEQSGNDLARLKLAIKY | SEQ ID No 661 |
| RQKEFVAQPNCQQLLASRWYDEFPGWRRRHWAVK | |
| VRKKQKAQHRCMRRVGRTGSRRSGYAFSHQEGFGELIMSGKNMRLSS | SEQ ID No 662 |
| LALSSFTTRSSSSWIESLRRKKSDSASSPSGGADKPLKG | |
| LLKLMFVNPPELPEQTTKALPVRFLFTDYNRLSSVGGETSLAEMIATLSD | SEQ ID No 663 |
| ACEREFGFLATRLFRVFKTEDTQGKKKWKKTCCLPS | |
| PPYLGKLDVSFQRACQCEGKDNRIPLLKEVFEAFPNTPINIDIKVNNNVLI | SEQ ID No 664 |
| KKVSELVKRYNREHLTVWGNANYEIVEKCYKENSD | |
| VVAAMQARHAHVPQLRWETMDVRKLDFPSASFDVVLEKGTLDALLAGE | SEQ ID No 665 |
| RDPWTVSSEGVHTVDQVLSEVGFQKGTRQLLGSRTQLE | |
| SAEVQAVLRKFDELDAVMSRLPHHSESRQEHERISRIHEEFKKKKNDPT | SEQ ID No 666 |
| FLEKKERCDYLKNKLSHIKQRIQEYDKVMNWDVQGYS | |
| AERVKELPSAGLVHYNFCTLPKRQFAPSYESRRQNQDRINKTVLYGTPR | SEQ ID No 667 |
| KCFVGQSKPNHPLLQAKPQSEPDYLEVLEKQTAISQL | |
| NLPPNPKRQQRKPKGNKNSILATEQEITYAELNLQKASQDFQGNDKTYH | SEQ ID No 668 |
| CKDLPSAPEK | |
| EKPESRTSIHNFMAHPEFRIEDSQPHIPLIDDTDLEEDAALKQNSSPPSSL | SEQ ID No 669 |
| NKNNSAIDSGINLTTDTSKSATSSSPGSPIHSLETSL | |
| EKPESRSSIHNFMTHPEFRIEDSEPHIPLIDDTDAEDDAPTKRNSSPPPSP | SEQ ID No 670 |
| NKNNNAVDSGIHLTIEMNKSATSSSPGSPLHSLETSL | |
| QGDPQRSPSSCNDLYATVKDFEKTPNSTLPPAGRPSEEPEPDYEAIQTL | SEQ ID No 671 |
| NREEEKATLGTNGHHGLVPKENDYESISDLQQGRDITRL | |
| KVAMIEPGYFKTAVTSKERFLKSFLEIWDRSSPEVKEAYGEKFVADYKKS | SEQ ID No 672 |
| AEQMEQKCTQDLSLVTNCMEHALIACHPRTRYSAGWDAK | |
| EKPESKTSIHNFMATPEFLINDYTHNIPLIDDTDVDENEERLRAPPPPSPN | SEQ ID No 673 |
| QNNNAIDSGIYLTTHVTKSATSSVFSSSPGSPLHSVETSL | |
| PAAPLAGPALPARRLSRASRPLSASQPSLPHGAPGPAASTRPASSSTPR | SEQ ID No 674 |
| LGPTPAARAAAPSPDRRDSASPGAAGGLDPQDSARSRLSSNL | |
| SKHFRKGFRTICAGLLGRAPGRASGRVCAAARGTHSGSVLERESSDLLH | SEQ ID No 675 |
| MSEAAGALRPCPGASQPCILEPCPGPSWQGPKAGDSILTVDVA | |
| SNAKIAYKQNKANTAQEQQYGSHEENLPADLEALQREIRMAQERLDLAV | SEQ ID No 676 |
| QAYSHQNNPHGPREKKAKVGSKAGSNKSTASSKSGDGKTSVWI | |
| QNEEESGEPEQAAGDAPPPYSSISAESAAYFDYKDESGFPKPPSYNVAT | SEQ ID No 677 |
| TLPSYDEAERTKAEATIPLVPGRDEDFVGRDDFDDADQLRIGNDG | |
| EGDPQTQLQDDKDPMLILRGRVPEGRALDSEVDPDPEGDLGVRGPVFG | SEQ ID No 678 |
| EPSAPPHTSGVSLGESRSSEVDVSDLGSRNYSARTDFYCLVSKDDM | |
| LLGDFLRACFVRFMNYCWCWDLEAGFPSYAEFDISGNVLGLIFNQGMIW | SEQ ID No 679 |
| MGSFYAPGLVGINVLRLLTSMYFQCWAVMSSNVPHERVFKASRSNN | |
| TIEPVQQAGCSATRLPGDGQTSAGDASLQDPPSYPPVQVIRARVSSGSS | SEQ ID No 680 |
| SEVSSINSDLEWDPEDVNLEGSKENVELLGSQVHQDSVRTAHLSDDD | |
| RRTLKQAFADCTVILCEHRIEAMLECQQFLVIEENKVRQYDSIQKLLNERS | SEQ ID No 681 |
| LFRQAISPSDRVKLFPHRNSSKCKSKPQIAALKEETEEEVQDTRL | |
| VKAFHSSLHESIQKPYNQKSIHSFMTHPEFAIEEELPRTPLLDEEEEENPD | SEQ ID No 682 |
| KASKFGTRVLLLDGEVTPYANTNNNAVDCNQVQLPQSDSSLQSLETSV | |
| NLPKGKKPAPQAAEPNNHTEYASIQTSPQPASEDTLTYADLDMVHLNRT | SEQ ID No 683 |
| PKQPAPKPEPSFSEYASVQVPRK | |
| TLQLAGTSPQKATTKLSSAQVDQVEVEYVTMASLPKEDISYASLTLGAED | SEQ ID No 684 |
| QEPTYCNMGHLSSHLPGRGPEEPTEYSTISRP | |
| ETGPKHIPLQTLLKFMVDIALGMEYLSNRNFLHRDLAARNCMLRDDMTV | SEQ ID No 685 |
| CVADFGLSKKIYSGDYYRQGRIAKMPVKWIAIESLADRVYTSKSDVWAF | |
| GVTMWEIATRGMTPYPGVQNHEMYDYLLHGHRLKQPEDCLDELYEIMY | |
| SCWRTDPLDRPTFSVLRLQLEKLLESLPDVRNQADVIYVNTQLLESSEGL | |
| AQGSTLAPLDLNIDPDSIIASCTPRAAISVVTAEVHDSKPHEGRYILNGGS | |
| EEWEDLTSAPSAAVTAEKNSVLPGERLVRNGVSWSHSSMLPLGSSLPD | |
| ELLFADDSSEGSEVLM | |

TABLE 5
Examples of naturally occurring intracellular domains
between ITIM and ITSM from proteins that have ITIM.*ITSM motif
and vary in length from 7-1882 (Table 4 comprises SEQ ID No 686
to SEQ ID No 717)

| | |
|---|---|
| KEEEMAD | SEQ ID No 686 |
| NFHGMNPSKDTS | SEQ ID No 687 |
| HFHKVQPQEPKVTD | SEQ ID No 688 |
| ELIKPHRAAKGAPTS | SEQ ID No 689 |
| SFQMVKPWDSRGQEATD | SEQ ID No 690 |
| QVSSAESHKDLGKKDTE | SEQ ID No 691 |
| SFSEMKSREPKDQEAPST | SEQ ID No 692 |
| SFQGLRLWEPADQEAPST | SEQ ID No 693 |
| NLPKGKKPAPQAAEPNNH | SEQ ID No 694 |
| NHSVIGPNSRLARNVKEAP | SEQ ID No 695 |
| DFQWREKTPEPPVPCVPEQ | SEQ ID No 696 |
| DHLALSRPRRLSTADPADAS | SEQ ID No 697 |
| SPTNNTVYASVTHSNRETEIWTPRENDTI | SEQ ID No 698 |
| DGLRDRRSFHGPYTVQAGLPLNPMGRTGLRGRGSLSCFGPNH | SEQ ID No 699 |
| MRIKMCLIKLCKSKAKSCENDLEMGMLNSKFKKTRYQAGMRNSENLTAN | SEQ ID No 700 |
| NTLSKP | |
| QDLKGDDTAVRDAHSKRDTKCQPQGSSGEEKGTPTTLRGGEASERKR | SEQ ID No 701 |
| PDSGCSTSKD | |
| KQQMEKGPIDAITGEARYSLSEDKLIRQQIDYKTLTLHCVCPENEGSAQV | SEQ ID No 702 |
| PVKVLNCDSITQAKDKLLD | |
| TLQLAGTSPQKATTKLSSAQVDQVEVEYVTMASLPKEDISYASLTLGAED | SEQ ID No 703 |
| QEPTYCNMGHLSSHLPGRGPEEP | |
| EDDSDVEWKFARSKLWLSYFDDGKTLPPPFSLVPSPKSFVYFIMRIVNFP | SEQ ID No 704 |
| KCRRRRLQKDIEMGMGNSKSRLNLFTQSNSRVFESHSFNSILNQP | |
| RKVPSFTFTPTVTYQRGGEAVSSGGRPGLLNISEPAAQPWLADTWPNT | SEQ ID No 705 |
| GNNHNDCSISCCTAGNGNSDSNLTTYSRPADCIANYNNQLDNKQTNLM | |
| LPES | |
| GDQPVYLPTQMLVKFMADIASGMEYLSTKRFIHRDLAARNCMLNENMSV | SEQ ID No 706 |
| CVADFGLSKKIYNGDYYRQGRIAKMPVKWIAIESLADRVYTSKSDVWSF | |
| GVTMWEIATRGQ | |
| ETGPKHIPLQTLLKFMVDIALGMEYLSNRNFLHRDLAARNCMLRDDMTV | SEQ ID No 707 |
| CVADFGLSKKIYSGDYYRQGRIAKMPVKWIAIESLADRVYTSKSDVWAF | |
| GVTMWEIATRGM | |
| FEFCDLGDLKAYLRSEQEHMRGDSQTMLLQRMACEVAAGLAAMHKLHF | SEQ ID No 708 |
| LHSDLALRNCFLTSDLNVKVGDYGIGFSRYKEDYIETDDKKVFPLRWTAP | |
| ELVTSFQDRLLTADQ | |
| LEAPVGREARKWLQLAVFCSPLVPGQSHLQLRIYFLNNTPCALQWALTN | SEQ ID No 709 |
| EQPHGGRLRGPCQLFDFNGARGDQCLKLTYISEGWENVDDSSCQLVP | |
| HLHIWHGKCPFRSFCFRRKAADENEDCSALTNEIIVTMHTFQDGLE | |
| QRSLYDRPASYKKKSMLDSEVKNLLSDDNSEGLTLLDLLSFTYQVARGM | SEQ ID No 710 |
| EFLASKNCVHRDLAARNVLLAQGKIVKICDFGLARDIMHDSNYVSKGSTF | |
| LPVKWMAPESIFDNLYTTLSDVWSYGILLWEIFSLGGTPYPGMMVDS | |
| KECAGEPLFSLFCAIKQQMEKGPIDAITGEARYSLSEDKLIRQQIDYKTLV | SEQ ID No 711 |
| LSCVSPDNANSPEVPVKILNCDTITQVKEKILDAIFKNVPCSHRPKAADMD | |
| LEWRQGSGARMILQDEDITTKIENDWKRLNTLAHYQVPDGSVVALVSKQV | |
| TVTESYTTSDTLKPSVHVHDNRPASNVVVTERVVGPISGADLHGMLEMP | SEQ ID No 712 |
| DLRDGSNVIVTERVIAPSSSLPTSLTIHHPRESSNVVVTERVIQPTSGMIG | |
| SLSMHPELANAHNVIVTERVVSGAGVTGISGTTGISGGIGSSGLVGTSMG | |
| AGSGALSGAGISGGGIGLSSLGGTASIGHMRSSSDHHFNQTIGSASPST | |
| ARSRI | |
| NPEYFSAADVYVPDEWEVAREKITMSRELGQGSFGMVYEGVAKGVVKD | SEQ ID No 713 |
| EPETRVAIKTVNEAASMRERIEFLNEASVMKEFNCHHVVRLLGVVSQGQ | |
| PTLVIMELMTRGDLKSYLRSLRPEMENNPVLAPPSLSKMIQMAGEIADG | |
| MAYLNANKFVHRDLAARNCMVAEDFTVKIGDFGMTRDIYETDYYRKGG | |
| KGLLPVRWMSPESLKDGVF | |
| GGAYVGPTQNRILRLSKELGIETYKVNVSERLVQYVKGKTYPFRGAFPP | SEQ ID No 714 |
| VWNPIAYLDYNNLWRTIDNMGKEIPTDAPWEAQHADKWDKMTMKELID | |
| KICWTKTARRFAYLFVNINVTSEPHEVSALWFLWYVKQCGGTTRIFSVTN | |
| GGQERKFVGGSGQVSERIMDLLGDQVKLNHPVTHVDQSSDNIIIETLNH | |
| EHYECKYVINAIPPTLTAKIHFRPELPAERNQLIQRLPMGAVIKCMMYYKE | |
| AFWKKKDYCGCMIIEDEDAPISITLDDTKPDGSLPAIMGFILARKADRLAK | |
| LHKEIRKKKICELYAKVLGSQEALHPVHYEEKNWCEEQYSGGCYTAYFP | |
| PGIM | |
| GGSYVGPTQNRILRLAKELGLETYKVNEVERLIHHVKGKSYPFRGPFPPV | SEQ ID No 715 |
| WNPITYLDHNNFWRTMDDMGREIPSDAPWKAPLAEEWDNMTMKELLD | |
| KLCWTESAKQLATLFVNLCVTAETHEVSALWFLWYVKQCGGTTRIISTTN | |
| GGQERKFVGGSGQVSERIMDLLGDRVKLERPVIYIDQTRENVLVETLNH | |
| EMYEAKYVISAIPPTLGMKIHFNPPLPMMRNQMITRVPLGSVIKCIVYYKE | |
| PFWRKKDYCGTMIIDGEEAPVAYTLDDTKPEGNYAAIMGFILAHKARKLA | |
| RLTKEERLKKLCELYAKVLGSLEALEPVHYEEKNWCEEQYSGGCYTTYF | |
| PPGIL | |
| KGKKFIVVCGNITVDSVTAFLRNFLRDKSGEINTEIVFLGETPPSLELETIF | SEQ ID No 716 |
| KCYLAYTTFISGSAMKWEDLRRVAVESAEACLIIANPLCSDSHAEDISNIM | |
| RVLSIKNYDSTTRIIIQILQSHNKVYLPKIPSWNWDTGDNIICFAELKLGFIA | |
| QGCLVPGLCTFLTSLFVEQNKKVMPKQTWKKHFLNSMKNKILTQRLSDD | |
| FAGMSFPEVARLCFLKMHLLLIAIEYKSLFTDGFCGLILNPPPQVRIRKNTL | |
| GFFIAETPKDVRRALFYCSVCHDDVFIPELITNCGCKSRSRQHITVPSVKR | |
| MKKCLKGISSRISGQDSPPRVSASTSSISNFTTRTLQHDVEQDSDQLDSS | |
| GMFHWCKPTSLDKVTLKRTGKSKYKFRNHIVACVFGDAHSAPMGLRNF | |
| VMPLRASNYTRKELKDIVFIGSLDYLQREWRFLWNFPQIYILPGCALYSG | |
| DLHAANIEQCSMCAVLSPPPQPSSNQTLVDTEAIMATLTIGSLQIDSSSD | |
| PSPSVSEETPGYTNGHNEKSNCRKVPILTELKNPSNIHFIEQLGGLEGSL | |
| QETNLHLSTAFSTGTVFSGSFLDSLLATAFYNYHVLELLQMLVTGGVSSQ | |
| LEQHLDKDKVYGVADSCTSLLSGRNRCKLGLLSLHETILSDVNPRNTFG | |
| QLFCGSLDLFGILCVGLYRIIDEEELNPENKRFVITRPANEFKLLPSDLVFC | |
| AIPFSTACYKRNEEFSLQKSYEIVNKASQTTETHSDTNCPPTIDSVTE | |
| ASLIRGNRSNCALFSTNLDWLVSKLDRLEASSGILEVLYCVLIESPEVLNII | SEQ ID No 717 |
| QENHIKSIISLLDKHGRNHKVLDVLCSLCVCNGVAVRSNQDLITENLLPGR | |
| ELLLQTNLINYVTSIRPNIFVGRAEGTTQYSKWYFEVMVDEVTPFLTAQA | |
| THLRVGWALTEGYTPYPGAGEGWGGNGVGDDLYSYGFDGLHLWTGH | |
| VARPVTSPGQHLLAPEDVISCCLDLSVPSISFRINGCPVQGVFESFNLDG | |
| LFFPVVSFSAGVKVRFLLGGRHGEFKFLPPPGYAPCHEAVLPRERLHLE | |
| PIKEYRREGPRGPHLVGPSRCLSHTDFVPCPVDTVQIVLPPHLERIREKL | |
| AENIHELWALTRIEQGWTYGPVRDDNKRLHPCLVDFHSLPEPERNYNLQ | |
| MSGETLKTLLALGCHVGMADEKAEDNLKKTKLPKTYMMSNGYKPAPLD | |
| LSHVRLTPAQTTLVDRLAENGHNVWARDRVGQGWSYSAVQDIPARRNP | |
| RLVPYRLLDEATKRSNRDSLCQAVRTLLGYGYNIEPPDQEPSQVENQSR | |
| CDRVRIFRAEKSYTVQSGRWYFEFEAVTTGEMRVGWARPELRPDVELG | |
| ADELAYVFNGHRGQRWHLGSEPFGRPWQPGDVVGCMIDLTENTIIFTLN | |
| GEVLMSDSGSETAFREIEIGDGFLPVCSLGPGQVGHLNLGQDVSSLRFF | |
| AICGLQEGFEPFAINMQRPVTTWFSKGLPQFEPVPLEHPHYEVSRVDGT | |
| VDTPPCLRLTHRTWGSQNSLVEMLFLRLSLPVQFHQHFRCTAGATPLAP | |
| PGLQPPAEDEARAAEPDPDYENLRRSAGGWSEAENGKEGTAKEGAPG | |
| GTPQAGGEAQPARAENEKDATTEKNKKRGFLFKAKKVAMMTQPPATPT | |
| LPRLPHDVVPADNRDDPEIILNTT | |

TABLE 6
Examples of naturally occurring N-terminal flanking regions of
ITSM only intracellular domains that could vary in length from
0-2002 (Table 6 comprises SEQ ID No 718 to SEQ ID No 805)

| | |
|---|---|
| V | |
| AM | |
| NLMSY | SEQ ID No 718 |
| SRFKRQ | SEQ ID No 719 |
| MDDSDTP | SEQ ID No 720 |
| YGKKRNR | SEQ ID No 721 |
| KSQWIKE | SEQ ID No 722 |
| CRGLAPEE | SEQ ID No 723 |
| RLCSAMKQ | SEQ ID No 724 |
| YRKREWIKE | SEQ ID No 725 |
| RKMKRSSSEIK | SEQ ID No 726 |
| FCNMRRPAHADIK | SEQ ID No 727 |
| LRTVKRANGGELK | SEQ ID No 728 |
| MEQHVGIDVLKRDP | SEQ ID No 729 |
| LEQHVDPHVLQNKP | SEQ ID No 730 |
| RNKDVKDAIRKIIN | SEQ ID No 731 |
| VDFRPPPQGPSGPEV | SEQ ID No 732 |
| DRYFALVQPFRLTRWR | SEQ ID No 733 |
| VRMTSEIETNIVAVERI | SEQ ID No 734 |
| MERLWGLFQRAQQLSPRSSQ | SEQ ID No 735 |
| MAEPQAESEPLLGGARGGGGDWPAGL | SEQ ID No 736 |
| PETKGVALPETMKDAENLGRKAKPKEN | SEQ ID No 737 |
| MEDEAVLDRGASFLKHVCDEEEVEGHH | SEQ ID No 738 |
| YKMYGSEMLHKRDPLDEDEDTDISYKKLKEEEMAD | SEQ ID No 739 |
| RHVSDLHGLTELILLPPPCPASFNADEDDRVDILGPQPESHQQLSASSH | SEQ ID No 740 |
| CSRAARGTIGARRTGQPLKEDPSAVPVFSVDYGELDFQWREKTPEPPV | SEQ ID No 741 |
| PCVPEQ | |
| RRKSIKKKRALRRFLETELVEPLTPSGTAPNQAQLRILKETELKRVKVLGS | SEQ ID No 742 |
| GAFG | |
| RIRQKKAQGSTSSTRLHEPEKNAREITQDTNDITYADLNLPKGKKPAPQA | SEQ ID No 743 |
| AEPNNH | |
| AVTISLAYSVKKMMKDNNLVRHLDACETMGNATAICSDKTGTLTTNRMT | SEQ ID No 744 |
| VVQSYLGD | |
| CCRKKRREEKYEKEVHHDIREDVPPPKSRTSTARSYIGSNHSSLGSMSP | SEQ ID No 745 |
| SNMEGYSK | |
| KRRQQKIRKYTMRRLLQETELVEPLTPSGAMPNQAQMRILKETELRKVK | SEQ ID No 746 |
| VLGSGAFG | |
| KYLQKPMYEVQWKVVEEINGNNYVYIDPTQLPYDHKWEFPRNRLSFGK | SEQ ID No 747 |
| TLGAGAFGKVVEA | |
| YTTYPLLKESALILLQTVPKQIDIRNLIKELRNVEGVEEVHELHVWQLAGS | SEQ ID No 748 |
| RIIATAHIKCEDP | |
| AANAIAQSCQPSFYDGTIIVKKLPYLPRILGRNIGSHHVRVEHFMNHSITTL | SEQ ID No 749 |
| AKDTPLEEVVKVVTSTDV | |
| WLHRRLPPQPIRPLPRFAPLVKTEPQRPVKEEEPKIPGDLDQEPSLLYAD | SEQ ID No 750 |
| LDHLALSRPRRLSTADPADAS | |
| KKYQPYKVIKQKLEGRPETEYRKAQTFSGHEDALDDFGIYEFVAFPDVS | SEQ ID No 751 |
| GVSRIPSRSVPASDCVSGQDLHS | |
| MDEINNKIEEEKLVKANITLWEANMIKAYNASFSENSTGPPFFVHPADVP | SEQ ID No 752 |
| RGPCWETMVGQEFVRLTVSDVL | |
| KTHRRKAARTAVGRNDTHPTTGSASPKHQKKSKLHGPTETSSCSGAAP | SEQ ID No 753 |
| TVEMDEELHYASLNFHGMNPSKDTS | |
| RVKTRRKKAAQPVQNTDDVNPVMVSGSRGHQHQFQTGIVSDHPAEAG | SEQ ID No 754 |
| PISEDEQELHYAVLHFHKVQPQEPKVTD | |
| IVLRRRRKRVNTKRSSRAFRAHLRAPLKGNCTHPEDMKLCTVIMKSNGS | SEQ ID No 755 |
| FPVNRRRVEAARRAQELEMEMLSSTSPPER | |
| KARRKQAAGRPEKMDDEDPIMGTITSGSRKKPWPDSPGDQASPPGDA | SEQ ID No 756 |
| PPLEEQKELHYASLSFSEMKSREPKDQEAPST | |
| KICRKEARKRAAAEQDVPSTLGPISQGHQHECSAGSSQDHPPPGAATY | SEQ ID No 757 |
| TPGKGEEQELHYASLSFQGLRLWEPADQEAPST | |
| QRVVCQRYAGANGPFPHEYVSGTPHVPLNFIAPGGSQHGPFTGIACGK | SEQ ID No 758 |
| SMMSSVSLMGGRGGVPLYDRNHVTGASSSSSSSTKA | |
| VRSCRKKSARPAAGVGDTGIEDANAVRGSASQGPLTEPWAEDSPPDQP | SEQ ID No 759 |
| PPASARSSVGEGELQYASLSFQMVKPWDSRGQEATD | |
| FVAKIARPKNRAFSIRFTDTAVVAHMDGKPNLIFQVANTRPSPLTSVRVS | SEQ ID No 760 |
| AVLYQERENGKLYQTSVDFHLDGISSDECPFFIFPL | |
| QLRRRGKTNHYQTTVEKKSLTIYAQVQKPGPLQKKLDSFPAQDPCTTIY | SEQ ID No 761 |
| VAATEPVPESVQETNSI | |
| ILAKISRPKKRAKTITFSKNAVISKRGGKLCLLIRVANLRKSLLIGSHIYGKL | SEQ ID No 762 |
| LKTTVTPEGETIILDQININFVVDAGNENLFFISPL | |
| FLAKIARPKKRAETIRFSQHAVVASHNGKPCLMIRVANMRKSLLIGCQVT | SEQ ID No 763 |
| GKLLQTHQTKEGENIRLNQVNVTFQVDTASDSPFLILPL | |
| WFLKRERQEEYIEEKKRVDICRETPNICPHSGENTEYDTIPHTNRTILKED | SEQ ID No 764 |
| PAN | |
| KCYFLRKAKAKQMPVEMSRPAVPLLNSNNEKMSDPNMEANSHYGHND | SEQ ID No 765 |
| DVRNHAMKPINDNKEPLNSDVQYTEVQVSSAESHKDLGKKDTE | |
| LRKRRDSLSLSTQRTQGPAESARNLEYVSVSPTNNTVYASVTHSNRETE | SEQ ID No 766 |
| IWTPRENDTI | |
| RLFKRRQGRIFPEGSCLNTFTKNPYAASKKTIYTYIMASRNTQPAESRIYD | SEQ ID No 767 |
| EILQSKVLPSKEEPVN | |
| RRHQGKQNELSDTAGREINLVDAHLKSEQTEASTRQNSQVLLSETGIYD | SEQ ID No 768 |
| NDPDLCFRMQEGSEVYSNPCLEENKPGIVYASLNHSVIGPNSRLARNVK | |
| EAP | |
| KYRHKRFAVSEQGNIPHSHDWVWLGNEVELLENPVDITLPSEECTTMID | SEQ ID No 769 |
| RGLQFEERNFLLNGSSQKTFHSQLLRPSDYVYEKEIKNEPMNSSGPKRK | |
| RVKF | |
| NSSYQEIEDDSDVEWKFARSKLWLSYFDDGKTLPPPFSLVPSPKSFVYFI | SEQ ID No 770 |
| MRIVNFPKCRRRRLQKDIEMGMGNSKSRLNLFTQSNSRVFESHSFNSIL | |
| NQP | |
| WRMMKYQQKAAGMSPEQVLQPLEGDLCYADLTLQLAGTSPQKATTKLS | SEQ ID No 771 |
| SAQVDQVEVEYVTMASLPKEDISYASLTLGAEDQEPTYCNMGHLSSHLP | |
| GRGPEEP | |
| NNSYQEIEEDADVEWKFARAKLWLSYFDEGRTLPAPFNLVPSPKSFYYLI | SEQ ID No 772 |
| MRIKMCLIKLCKSKAKSCENDLEMGMLNSKFKKTRYQAGMRNSENLTAN | |
| NTLSKP | |
| QSVFNKRKSRVRHYLVKCPQNSSGETVTSVTSLAPLQPKKGKRQKEKP | SEQ ID No 773 |
| DIPPAVPAKAPIAPTFHKPKLLKPQRKVTLPKIAEENLTYAELELIKPHRAA | |
| KGAPTS | |
| YRHRKKRNGLTSTYAGIRKVPSFTFTPTVTYQRGGEAVSSGGRPGLLNI | SEQ ID No 774 |
| SEPAAQPWLADTWPNTGNNHNDCSISCCTAGNGNSDSNLTTYSRPAD | |
| CIANYNNQLDNKQTNLMLPES | |
| RYQRWKSKLYSIVCGKSTPEKEGELEGTTTKPLAPNPSFSPTPGFTPTL | SEQ ID No 775 |
| GFSPVPSSTFTSSSTYTPGDCPNFAAPRREVAPPYQGADPILATALASD | |
| PIPNPLQKWEDSAHKPQSLDTDDPA | |
| VRLRLQKHRPPADPCRGETETMNNLANCQREKDISVSIIGATQIKNTNKK | SEQ ID No 776 |
| ADFHGDHSADKNGFKARYPAVDYNLVQDLKGDDTAVRDAHSKRDTKC | |
| QPQGSSGEEKGTPTTLRGGEASERKRPDSGCSTSKD | |
| RAWVVFKLSSAPRLHEQRVRDIQKQVREWKEQGSKTFMCTGRPGWLT | SEQ ID No 777 |
| VSLRVGKYKKTHKNIMINLMDILEVDTKKQIVRVEPLVTMGQVTALLTSIG | |
| WTLPVLPELDDLTVGGLIMGTGIESSSHKYGLFQHIC | |
| TRDLVDDMGRHKSDRAINNRPCQILMGKSFKQKKWQDLCVGDVVCLRK | SEQ ID No 778 |
| DNIVPADMLLLASTEPSSLCYVETVDIDGETNLKFRQALMVTHKELATIKK | |
| MASFQGTVTCEAPNSRMHHFVGCLEWNDKKYSLDIGNLLLRGCRIRNTD | |
| VFDPLGGKMAPYSSAGPSHLDSHDSSQLLNGLKTAATSVWETRIKLLCC | SEQ ID No 779 |
| CIGKDDHTRVAFSSTAELFSTYFSDTDLVPSDIAAGLALLHQQQDNIRNN | |
| QEPAQVVCHAPGSSQEADLDAELENCHHYMQFAAAAYGWPLYIYRNPL | |
| TGLCRIGGDCCRSRT | |
| WRRKRKEKQSETSPKEFLTIYEDVKDLKTRRNHEQEQTFPGGGSTIYSM | SEQ ID No 780 |
| IQSQSSAPTSQEPAYTLYSLIQPSRKSGSRKRNHSPSFNS | |
| RKRNNSRLGNGVLYASVNPEYFSAADVYVPDEWEVAREKITMSRELGQ | SEQ ID No 781 |
| GSFGMVYEGVAKGVVKDEPETRVAIKTVNEAASMRERIEFLNEASVMKE | |
| FNCHHVVRLLGVVSQGQPTLVIMELMTRGDLKSYLRSLRPEMENNPVLA | |
| PPSLSKMIQMAGEIADGMAYLNANKFVHRDLAARNCMVAEDFTVKIGDF | |
| GMTRDIYETDYYRKGGKGLLPVRWMSPESLKDGVF | |
| NKCGRRNKFGINRPAVLAPEDGLAMSLHFMTLGGSSLSPTEGKGSGLQ | SEQ ID No 782 |
| GHIIENPQYFSDACVHHIKRRDIVLKWELGEGAFGKVFLAECHNLLPEQD | |
| KMLVAVKALKEASESARQDFQREAELLTMLQHQHIVRFFGVCTEGRPLL | |
| MVFEYMRHGDLNRFLRSHGPDAKLLAGGEDVAPGPLGLGQLLAVASQV | |
| AAGMVYLAGLHFVHRDLATRNCLVGQGLVVKIGDFGMSRDIYS | |
| KLARHSKFGMKGPASVISNDDDSASPLHHISNGSNTPSSSEGGPDAVIIG | SEQ ID No 783 |
| MTKIPVIENPQYFGITNSQLKPDTFVQHIKRHNIVLKRELGEGAFGKVFLA | |
| ECYNLCPEQDKILVAVKTLKDASDNARKDFHREAELLTNLQHEHIVKFYG | |
| VCVEGDPLIMVFEYMKHGDLNKFLRAHGPDAVLMAEGNPPTELTQSQM | |
| LHIAQQIAAGMVYLASQHFVHRDLATRNCLVGENLLVKIGDFGMSRDVYS | |
| NCVSCCKDPEIDFKEFEDNFDDEIDFTPPAEDTPSVQSPAEVFTLSVPNI | SEQ ID No 784 |
| SLPAPSQFQPSVEGLKSQVARHSLNYIQEIGNGWFGKVLLGEIYTGTSVA | |
| RVIVKELKASANPKEQDTFLKNGEPYYILQHPNILQCVGQCVEAIPYLLVF | |
| EFCDLGDLKAYLRSEQEHMRGDSQTMLLQRMACEVAAGLAAMHKLHFL | |
| HSDLALRNCFLTSDLNVKVGDYGIGFSRYKEDYIETDDKKVFPLRWTAPE | |
| LVTSFQDRLLTADQ | |
| YKRKTQDADRTLKRLQLQMDNLESRVALECKEAFAELQTDINELTNHMD | SEQ ID No 785 |
| EVQIPFLDYRTYAVRVLFPGIEAHPVLKELDTPPNVEKALRLFGQLLHSRA | |
| FVLTFIHTLEAQSSFSMRDRGTVASLTMVALQSRLDYATGLLKQLLADLIE | |
| KNLESKNHPKLLLRRTESVAEKMLTNWFTFLLHKFLKECAGEPLFLLYCA | |
| IKQQMEKGPIDAITGEARYSLSEDKLIRQQIDYKTLTLHCVCPENEGSAQV | |
| PVKVLNCDSITQAKDKLLD | |
| KRKGRCSVPAFCSSQAEAPADTPEPTAGHTLYSVLSQGYEKLDTPLRPA | SEQ ID No 786 |
| RQQPTPTSDSSSDSNLTTEEDEDRPEVHKPISGRYEVFDQVTQEGAGH | |
| DPAPEGQADYDPVTPYVTEVESVVGENTMYAQVFNLQGKTPVSQKEES | |
| SA | |
| KRVQETKFGNAFTEEDSELVVNYIAKKSFCRRAIELTLHSLGVSEELQNK | SEQ ID No 787 |
| LEDVVIDRNLLILGKILGEGEFGSVMEGNLKQEDGTSLKVAVKTMKLDNS | |
| SQREIEEFLSEAACMKDFSHPNVIRLLGVCIEMSSQGIPKPMVILPFMKY | |
| GDLHTYLLYSRLETGPKHIPLQTLLKFMVDIALGMEYLSNRNFLHRDLAA | |
| RNCMLRDDMTVCVADFGLSKKIYSGDYYRQGRIAKMPVKWIAIESLADR | |
| VYTSKSDVWAFGVTMWEIATRGM | |
| SRQQRRREARGRGDASGLKRNSERKTPEGRASPAPGSGHPEGPGAHL | SEQ ID No 788 |
| DMNSLDRAQAAKNKGNKYFKAGKYEQAIQCYTEAISLCPTEKNVDLSTF | |
| YQNRAAAFEQLQKWKEVAQDCTKAVELNPKYVKALFRRAKAHEKLDNK | |
| KECLEDVTAVCILEGFQNQQSMLLADKVLKLLGKEKAKEKYKNREPLMP | |
| SPQFIKSYFSSFTDDIISQPMLKGEKSDEDKDKEGEALEVKENSGYLKAK | |
| QYMEEENYDKIISECSKEIDAEGKYMAEALLLRA | |
| LRKRRKETRFGQAFDSVMARGEPAVHFRAARSFNRERPERIEATLDSLG | SEQ ID No 789 |
| ISDELKEKLEDVLIPEQQFTLGRMLGKGEFGSVREAQLKQEDGSFVKVA | |
| VKMLKADIIASSDIEEFLREAACMKEFDHPHVAKLVGVSLRSRAKGRLPIP | |
| MVILPFMKHGDLHAFLLASRIGENPFNLPLQTLIRFMVDIACGMEYLSSRN | |
| FIHRDLAARNCMLAEDMTVCVADFGLSRKIYSGDYYRQGCASKLPVKWL | |
| ALESLADNLYTVQSDVWAFGVTMWEIMTRGQ | |
| HRRKKETRYGEVFEPTVERGELVVRYRVRKSYSRRTTEATLNSLGISEE | SEQ ID No 790 |
| LKEKLRDVMVDRHKVALGKTLGEGEFGAVMEGQLNQDDSILKVAVKTM | |
| KIAICTRSELEDFLSEAVCMKEFDHPNVMRLIGVCFQGSERESFPAPVVIL | |
| PFMKHGDLHSFLLYSRLGDQPVYLPTQMLVKFMADIASGMEYLSTKRFI | |
| HRDLAARNCMLNENMSVCVADFGLSKKIYNGDYYRQGRIAKMPVKWIAI | |
| ESLADRVYTSKSDVWSFGVTMWEIATRGQ | |
| KRIELDDSISASSSSQGLSQPSTQTTQYLRADTPNNATPITSYPTLRIEKN | SEQ ID No 791 |
| DLRSVTLLEAKGKVKDIAISRERITLKDVLQEGTFGRIFHGILIDEKDPNKE | |
| KQAFVKTVKDQASEIQVTMMLTESCKLRGLHHRNLLPITHVCIEEGEKPM | |
| VILPYMNWGNLKLFLRQCKLVEANNPQAISQQDLVHMAIQIACGMSYLA | |
| RREVIHKDLAARNCVIDDTLQVKITDNALSRDLFPMDYHCLGDNENRPVR | |
| WMALESLVNNEFSSASDVWAFGVTLWELMTLGQ | |
| NCRTWWQVLDSLLNSQRKRLHNAASKLHKLKSEGFMKVLKCEVELMAR | SEQ ID No 792 |
| MAKTIDSFTQNQTRLVVIIDGLDACEQDKVLQMLDTVRVLFSKGPFIAIFA | |
| SDPHIIIKAINQNLNSVLRDSNINGHDYMRNIVHLPVFLNSRGLSNARKFL | |
| VTSATNGDVPCSDTTGIQEDADRRVSQNSLGEMTKLGSKTALNRRDTY | |
| RRRQMQRTITRQMSFDLTKLLVTEDWFSDISPQTMRRLLNIVSVTGRLLR | |
| ANQISFNWDRLASWINLTEQWPYRTSWLILYLEETEGIPDQMTLK | |
| MFNYTFQQVQEHTDQIWKFQRHDLIEEYHGRPAAPPPFILLSHLQLFIKR | SEQ ID No 793 |
| VVLKTPAKRHKQLKNKLEKNEEAALLSWEIYLKENYLQNRQFQQKQRPE | |
| QKIEDISNKVDAMVDLLDLDPLKRSGSMEQRLASLEEQVAQTAQALHWI | |
| VRTLRASGFSSEADVPTLASQKAAEEPDAEPGGRKKTEEPGDSYHVNA | |
| RHLLYPNCPVTRFPVPNEKVPWETEFLIYDPPFYTAERKDAAAMDPMGD | |
| TLEPLSTIQYNVVDGLRDRRSFHGPYTVQAGLPLNPMGRTGLRGRGSLS | |
| CFGPNH | |
| AYKRKSRESDLTLKRLQMQMDNLESRVALECKEAFAELQTDIHELTSDL | SEQ ID No 794 |
| DGAGIPFLDYRTYTMRVLFPGIEDHPVLRDLEVPGYRQERVEKGLKLFA | |
| QLINNKVFLLSFIRTLESQRSFSMRDRGNVASLIMTVLQSKLEYATDVLKQ | |
| LLADLIDKNLESKNHPKLLLRRTESVAEKMLTNWFTFLLYKFLKECAGEPL | |
| FSLFCAIKQQMEKGPIDAITGEARYSLSEDKLIRQQIDYKTLVLSCVSPDN | |
| ANSPEVPVKILNCDTITQVKEKILDAIFKNVPCSHRPKAADMDLEWRQGS | |
| GARMILQDEDITTKIENDWKRLNTLAHYQVPDGSVVALVSKQV | |
| RWHCPRRLLGACWTLNGQEEPVSQPTPQLENEVSRQHLPATLPEMVA | SEQ ID No 795 |
| FYQELHTPTQGQTMVRQLMHKLLVFSAREVDHRGGCLMLQDTGISLLIP | |
| PGAVAVGRQERVSLILVWDLSDAPSLSQAQGLVSPVVACGPHGASFLK | |
| PCTLTFKHCAEQPSHARTYSSNTTLLDAKVWRPLGRPGAHASRDECRIH | |
| LSHFSLYTCVLEAPVGREARKWLQLAVFCSPLVPGQSHLQLRIYFLNNTP | |
| CALQWALTNEQPHGGRLRGPCQLFDFNGARGDQCLKLTYISEGWENV | |
| DDSSCQLVPHLHIWHGKCPFRSFCFRRKAADENEDCSALTNEIIVTMHT | |
| FQDGLE | |
| KQKPRYEIRWRVIESISPDGHEYIYVDPMQLPYDSRWEFPRDGLVLGRV | SEQ ID No 796 |
| LGSGAFGKVVEGTAYGLSRSQPVMKVAVKMLKPTARSSEKQALMSELKI | |
| MTHLGPHLNIVNLLGACTKSGPIYIITEYCFYGDLVNYLHKNRDSFLSHHP | |
| EKPKKELDIFGLNPADESTRSYVILSFENNGDYMDMKQADTTQYVPMLE | |
| RKEVSKYSDIQRSLYDRPASYKKKSMLDSEVKNLLSDDNSEGLTLLDLLS | |
| FTYQVARGMEFLASKNCVHRDLAARNVLLAQGKIVKICDFGLARDIMHD | |
| SNYVSKGSTFLPVKWMAPESIFDNLYTTLSDVWSYGILLWEIFSLGGTPY | |
| PGMMVDS | |
| CCCKQRQPEGLGTRFAPVPEGGEGVMQSWRIEGAHPEDRDVSNICAP | SEQ ID No 797 |
| MTASNTQDRMDSSEIYTNTYAAGGTVEGGVSGVELNTGMGTAVGLMAA | |
| GAAGASGAARKRSSTMGTLRDYADADINMAFLDSYFSEKAYAYADEDE | |
| GRPANDCLLIYDHEGVGSPVGSIGCCSWIVDDLDESCMETLDPKFRTLA | |
| EICLNTEIEPFPSHQACIPISTDLPLLGPNYFVNESSGLTPSEVEFQEEMA | |
| ASEPVVHGDIIVTETYGNADPCVQPTTIIFDPQLAPNVVVTEAVMAPVYDI | |
| QGNICVPAELADYNNVIYAERVLASPGVPDMSNSSTTEGCMGPVMSGNI | |
| LVGPEIQVMQMMSPDLPIGQTVGSTSPMTSRHRV | |
| SNKCDVVVVGGGISGMAAAKLLHDSGLNVVVLEARDRVGGRTYTLRNQ | SEQ ID No 798 |
| KVKYVDLGGSYVGPTQNRILRLAKELGLETYKVNEVERLIHHVKGKSYPF | |
| RGPFPPVWNPITYLDHNNFWRTMDDMGREIPSDAPWKAPLAEEWDNM | |
| TMKELLDKLCWTESAKQLATLFVNLCVTAETHEVSALWFLWYVKQCGG | |
| TTRIISTTNGGQERKFVGGSGQVSERIMDLLGDRVKLERPVIYIDQTREN | |
| VLVETLNHEMYEAKYVISAIPPTLGMKIHFNPPLPMMRNQMITRVPLGSVI | |
| KCIVYYKEPFWRKKDYCGTMIIDGEEAPVAYTLDDTKPEGNYAAIMGFIL | |
| AHKARKLARLTKEERLKKLCELYAKVLGSLEALEPVHYEEKNWCEEQYS | |
| GGCYTTYFPPGIL | |
| MENQEKASIAGHMFDVVVIGGGISGLSAAKLLTEYGVSVLVLEARDRVG | SEQ ID No 799 |
| GRTYTIRNEHVDYVDVGGAYVGPTQNRILRLSKELGIETYKVNVSERLVQ | |
| YVKGKTYPFRGAFPPVWNPIAYLDYNNLWRTIDNMGKEIPTDAPWEAQH | |
| ADKWDKMTMKELIDKICWTKTARRFAYLFVNINVTSEPHEVSALWFLWY | |
| VKQCGGTTRIFSVTNGGQERKFVGGSGQVSERIMDLLGDQVKLNHPVT | |
| HVDQSSDNIIIETLNHEHYECKYVINAIPPTLTAKIHFRPELPAERNQLIQRL | |
| PMGAVIKCMMYYKEAFWKKKDYCGCMIIEDEDAPISITLDDTKPDGSLPA | |
| IMGFILARKADRLAKLHKEIRKKKICELYAKVLGSQEALHPVHYEEKNWC | |
| EEQYSGGCYTAYFPPGIM | |
| CCDCGGAPRSAAGFEPVPECSDGAIHSWAVEGPQPEPRDITTVIPQIPP | SEQ ID No 800 |
| DNANIIECIDNSGVYTNEYGGREMQDLGGGERMTGFELTEGVKTSGMP | |
| EICQEYSGTLRRNSMRECREGGLNMNFMESYFCQKAYAYADEDEGRP | |
| SNDCLLIYDIEGVGSPAGSVGCCSFIGEDLDDSFLDTLGPKFKKLADISLG | |
| KESYPDLDPSWPPQSTEPVCLPQETEPVVSGHPPISPHFGTTTVISESTY | |
| PSGPGVLHPKPILDPLGYGNVTVTESYTTSDTLKPSVHVHDNRPASNVV | |
| VTERVVGPISGADLHGMLEMPDLRDGSNVIVTERVIAPSSSLPTSLTIHHP | |
| RESSNVVVTERVIQPTSGMIGSLSMHPELANAHNVIVTERVVSGAGVTGI | |
| SGTTGISGGIGSSGLVGTSMGAGSGALSGAGISGGGIGLSSLGGTASIG | |
| HMRSSSDHHFNQTIGSASPSTARSRI | |
| NLEGVMNQADAPRPLNWTIRKLCHAAFLPSVRLLKAQKSWIERAFYKRE | SEQ ID No 801 |
| CVHIIPSTKDPHRCCCGRLIGQHVGLTPSISVLQNEKNESRLSRNDIQSE | |
| KWSISKHTQLSPTDAFGTIEFQGGGHSNKAMYVRVSFDTKPDLLLHLMT | |
| KEWQLELPKLLISVHGGLQNFELQPKLKQVFGKGLIKAAMTTGAWIFTGG | |
| VNTGVIRHVGDALKDHASKSRGKICTIGIAPWGIVENQEDLIGRDVVRPY | |
| QTMSNPMSKLTVLNSMHSHFILADNGTTGKYGAEVKLRRQLEKHISLQKI | |
| NTRCLPFFSLDSRLFYSFWGSCQLDSVGIGQGVPVVALIVEGGPNVISIV | |
| LEYLRDTPPVPVVVCDGSGRASDILAFGHKYSEEGGLINESLRDQLLVTI | |
| QKTFTYTRTQAQHLFIILMECMKKKELITVFRMGSEGHQDIDLAILTALLK | |
| GANASAPDQLSLALAWNRVDIARSQIFIYGQQWPVGSLEQAMLDALVLD | |
| RVDFVKLLIENGVSMHRFLTISRLEELYNTRHGPSN | |
| ELFANKRKYTSSYEALKGKKFIVVCGNITVDSVTAFLRNFLRDKSGEINTE | SEQ ID No 802 |
| IVFLGETPPSLELETIFKCYLAYTTFISGSAMKWEDLRRVAVESAEACLIIA | |
| NPLCSDSHAEDISNIMRVLSIKNYDSTTRIIIQILQSHNKVYLPKIPSWNWD | |
| TGDNIICFAELKLGFIAQGCLVPGLCTFLTSLFVEQNKKVMPKQTWKKHF | |
| LNSMKNKILTQRLSDDFAGMSFPEVARLCFLKMHLLLIAIEYKSLFTDGFC | |
| GLILNPPPQVRIRKNTLGFFIAETPKDVRRALFYCSVCHDDVFIPELITNCG | |
| CKSRSRQHITVPSVKRMKKCLKGISSRISGQDSPPRVSASTSSISNFTTR | |
| TLQHDVEQDSDQLDSSGMFHWCKPTSLDKVTLKRTGKSKYKFRNHIVA | |
| CVFGDAHSAPMGLRNFVMPLRASNYTRKELKDIVFIGSLDYLQREWRFL | |
| WNFPQIYILPGCALYSGDLHAANIEQCSMCAVLSPPPQPSSNQTLVDTE | |
| AIMATLTIGSLQIDSSSDPSPSVSEETPGYTNGHNEKSNCRKVPILTELKN | |
| PSNIHFIEQLGGLEGSLQETNLHLSTAFSTGTVFSGSFLDSLLATAFYNYH | |
| VLELLQMLVTGGVSSQLEQHLDKDKVYGVADSCTSLLSGRNRCKLGLLS | |
| LHETILSDVNPRNTFGQLFCGSLDLFGILCVGLYRIIDEEELNPENKRFVIT | |
| RPANEFKLLPSDLVFCAIPFSTACYKRNEEFSLQKSYEIVNKASQTTETH | |
| SDTNCPPTIDSVTE | |
| QFEELVYLWMERQKSGGNYSRHRAQTEKHVVLCVSSLKIDLLMDFLNEF | SEQ ID No 803 |
| YAHPRLQDYYVVILCPTEMDVQVRRVLQIPLWSQRVIYLQGSALKDQDL | |
| MRAKMDNGEACFILSSRNEVDRTAADHQTILRAWAVKDFAPNCPLYVQI | |
| LKPENKFHVKFADHVVCEEECKYAMLALNCICPATSTLITLLVHTSRGQE | |
| GQESPEQWQRMYGRCSGNEVYHIRMGDSKFFREYEGKSFTYAAFHAH | |
| KKYGVCLIGLKREDNKSILLNPGPRHILAASDTCFYINITKEENSAFIFKQE | |
| EKRKKRAFSGQGLHEGPARLPVHSIIASMGTVAMDLQGTEHRPTQSGG | |
| GGGGSKLALPTENGSGSRRPSIAPVLELADSSALLPCDLLSDQSEDEVT | |
| PSDDEGLSVVEYVKGYPPNSPYIGSSPTLCHLLPVKAPFCCLRLDKGCK | |
| HNSYEDAKAYGFKNKLIIVSAETAGNGLYNFIVPLRAYYRSRKELNPIVLL | |
| LDNKPDHHFLEAICCFPMVYYMEGSVDNLDSLLQCGIIYADNLVVVDKES | |
| TMSAEEDYMADAKTIVNVQTMFRLFPSLSITTELTHPSNMRFMQFRAKD | |
| SYSLALSKLEKRERENGSNLAFMFRLPFAAGRVFSISMLDTLLYQSFVKD | |
| YMITITRLLLGLDTTPGSGYLCAMKITEGDLWIRTYGRLFQKLCSSSAEIPI | |
| GIYRTESHVFSTSESQISVNVEDCEDTREVKGPWGSRAGTGGSSQGRH | |
| TGGGDPAEHPLLRRKSLQWARRLSRKAPKQAGRAAAAEWISQQRLSLY | |
| RRSERQELSELVKNRMKHLGLPT | |
| MSGGASATGPRRGPPGLEDTTSKKKQKDRANQESKDGDPRKETGSRY | SEQ ID No 804 |
| VAQAGLEPLASGDPSASASHAAGITGSRHRTRLFFPSSSGSASTPQEEQ | |
| TKEGACEDPHDLLATPTPELLLDWRQSAEEVIVKLRVGVGPLQLEDVDA | |
| AFTDTDCVVRFAGGQQWGGVFYAEIKSSCAKVQTRKGSLLHLTLPKKVP | |
| MLTWPSLLVEADEQLCIPPLNSQTCLLGSEENLAPLAGEKAVPPGNDPV | |
| SPAMVRSRNPGKDDCAKEEMAVAADAATLVDEPESMVNLAFVKNDSYE | |
| KGPDSVVVHVYVKEICRDTSRVLFREQDFTLIFQTRDGNFLRLHPGCGP | |
| HTTFRWQVKLRNLIEPEQCTFCFTASRIDICLRKRQSQRWGGLEAPAAR | |
| VGGAKVAVPTGPTPLDSTPPGGAPHPLTGQEEARAVEKDKSKARSEDT | |
| GLDSVATRTPMEHVTPKPETHLASPKPTCMVPPMPHSPVSGDSVEEEE | |
| EEEKKVCLPGFTGLVNLGNTCFMNSVIQSLSNTRELRDFFHDRSFEAEIN | |
| YNNPLGTGGRLAIGFAVLLRALWKGTHHAFQPSKLKAIVASKASQFTGY | |
| AQHDAQEFMAFLLDGLHEDLNRIQNKPYTETVDSDGRPDEVVAEEAWQ | |
| RHKMRNDSFIVDLFQGQYKSKLVCPVCAKVSITFDPFLYLPVPLPQKQKV | |
| LPVFYFAREPHSKPIKFLVSVSKENSTASEVLDSLSQSVHVKPENLRLAE | |
| VIKNRFHRVFLPSHSLDTVSPSDTLLCFELLSSELAKERVVVLEVQQRPQ | |
| VPSVPISKCAACQRKQQSEDEKLKRCTRCYRVGYCNQLCQKTHWPDH | |
| KGLCRPENIGYPFLVSVPASRLTYARLAQLLEGYARYSVSVFQPPFQPG | |
| RMALESQSPGCTTLLSTGSLEAGDSERDPIQPPELQLVTPMAEGDTGLP | |
| RVWAAPDRGPVPSTSGISSEMLASGPIEVGSLPAGERVSRPEAAVPGY | |
| QHPSEAMNAHTPQFFIYKIDSSNREQRLEDKGDTPLELGDDCSLALVWR | |
| NNERLQEFVLVASKELECAEDPGSAGEAARAGHFTLDQCLNLFTRPEVL | |
| APEEAWYCPQCKQHREASKQLLLWRLPNVLIVQLKRFSFRSFIWRDKIN | |
| DLVEFPVRNLDLSKFCIGQKEEQLPSYDLYAVINHYGGMIGGHYTACARL | |
| PNDRSSQRSDVGWRLFDDSTVTTVDESQVV | |
| MADGGEGEDEIQFLRTDDEVVLQCTATIHKEQQKLCLAAEGFGNRLCFL | SEQ ID No 805 |
| ESTSNSKNVPPDLSICTFVLEQSLSVRALQEMLANTVEKSEGQVDVEKW | |
| KFMMKTAQGGGHRTLLYGHAILLRHSYSGMYLCCLSTSRSSTDKLAFDV | |
| GLQEDTTGEACWWTIHPASKQRSEGEKVRVGDDLILVSVSSERYLHLSY | |
| GNGSLHVDAAFQQTLWSVAPISSGSEAAQGYLIGGDVLRLLHGHMDEC | |
| LTVPSGEHGEEQRRTVHYEGGAVSVHARSLWRLETLRVAWSGSHIRW | |
| GQPFRLRHVTTGKYLSLMEDKNLLLMDKEKADVKSTAFTFRSSKEKLDV | |
| GVRKEVDGMGTSEIKYGDSVCYIQHVDTGLWLTYQSVDVKSVRMGSIQ | |
| RKAIMHHEGHMDDGISLSRSQHEESRTARVIRSTVFLFNRFIRGLDALSK | |
| KAKASTVDLPIESVSLSLQDLIGYFHPPDEHLEHEDKQNRLRALKNRQNL | |
| FQEEGMINLVLECIDRLHVYSSAAHFADVAGREAGESWKSILNSLYELLA | |
| ALIRGNRKNCAQFSGSLDWLISRLERLEASSGILEVLHCVLVESPEALNIIK | |
| EGHIKSIISLLDKHGRNHKVLDVLCSLCVCHGVAVRSNQHLICDNLLPGR | |
| DLLLQTRLVNHVSSMRPNIFLGVSEGSAQYKKWYYELMVDHTEPFVTAE | |
| ATHLRVGWASTEGYSPYPGGGEEWGGNGVGDDLFSYGFDGLHLWSG | |
| CIARTVSSPNQHLLRTDDVISCCLDLSAPSISFRINGQPVQGMFENFNIDG | |
| LFFPVVSFSAGIKVRFLLGGRHGEFKFLPPPGYAPCYEAVLPKEKLKVEH | |
| SREYKQERTYTRDLLGPTVSLTQAAFTPIPVDTSQIVLPPHLERIREKLAE | |
| NIHELWVMNKIELGWQYGPVRDDNKRQHPCLVEFSKLPEQERNYNLQM | |
| SLETLKTLLALGCHVGISDEHAEDKVKKMKLPKNYQLTSGYKPAPMDLSF | |
| IKLTPSQEAMVDKLAENAHNVWARDRIRQGWTYGIQQDVKNRRNPRLV | |
| PYTLLDDRTKKSNKDSLREAVRTLLGYGYNLEAPDQDHAARAEVCSGT | |
| GERFRIFRAEKTYAVKAGRWYFEFETVTAGDMRVGWSRPGCQPDQEL | |
| GSDERAFAFDGFKAQRWHQGNEHYGRSWQAGDVVGCMVDMNEHTM | |
| MFTLNGEILLDDSGSELAFKDFDVGDGFIPVCSLGVAQVGRMNFGKDVS | |
| TLKYFTICGLQEGYEPFAVNTNRDITMWLSKRLPQFLQVPSNHEHIEVTRI | |
| DGTIDSSPCLKVTQKSFGSQNSNTDIMFYRLSMPIECAEVFSKTVAGGLP | |
| GAGLFGPKNDLEDYDADSDFEVLMKTAHGHLVPDRVDKDKEATKPEFN | |
| NHKDYAQEKPSRLKQRFLLRRTKPDYSTSHSARLTEDVLADDRDDYDFL | |
| MQTS | |

TABLE 7
Naturally occurring C-terminal flanking regions of
ITIM.*ITSM intracellular domains varying in length from 1-2890
(Table 7 comprises SEQ ID No 806 to SEQ ID No 836)

| | |
|---|---|
| V | |
| SRP | |
| RTQ | |
| KIHK | SEQ ID No 806 |
| KTSK | SEQ ID No 807 |
| KIHR | SEQ ID No 808 |
| CVRS | SEQ ID No 809 |
| QYSK | SEQ ID No 810 |
| LFEENKL | SEQ ID No 811 |
| KAENIIMMETAQTSL | SEQ ID No 812 |
| YVISEEKDECVIATEV | SEQ ID No 813 |
| NHSKESKPTFSRATALDNV | SEQ ID No 814 |
| RKAVPDAVESRYSRTEGSLDGT | SEQ ID No 815 |
| KIHTGQPLRGPGFGLQLEREMSGMVPK | SEQ ID No 816 |
| VFPSGMGTSSPARRGSADGPRSAQPLRPEDGHCSWPL | SEQ ID No 817 |
| QTSPQPASEDTLTYADLDMVHLNRTPKQPAPKPEPSFSEYASVQVPRK | SEQ ID No 818 |
| YSYQPRTNSLSFPKQIAWNQSRTNSIISSQIPLGDNAKENERKTSDEVYD | SEQ ID No 819 |
| EDPFAYSEPL | |
| MKRLIKRYVLKAQVDKENDEVNEGELKEIKQDISSLRYELLEDKSQATEE | SEQ ID No 820 |
| LAILIHKLSEKLNPSMLRCE | |
| IRQPVGRIFFAGTETATKWSGYMEGAVEAGERAAREVLNGLGKVTEKDI | SEQ ID No 821 |
| WVQEPESKDVPAVEITHTFWERNLPS | |
| LRQPVDRIYFAGTETATHWSGYMEGAVEAGERAAREILHAMGKIPEDEI | SEQ ID No 822 |
| WQSEPESVDVPAQPITTTFLERHLPSV | |
| MKRLIKRYVLKAQVDRENDEVNEGELKEIKQDISSLRYELLEEKSQATGE | SEQ ID No 823 |
| LADLIQQLSEKFGKNLNKDHLRVNKGKDI | |
| LFYRRRNSPVERPPRAGHSEHHPDLGPAAEAAASQASRIWQELEAEEE | SEQ ID No 824 |
| PVPEGSGPLGPWGPQDWVGPLPRGPTTPDEGCLRY | |
| LRFQASEEESWAAPPPVSQPPPCNRLPPELFEQLRMLLEPNSITGNDW | SEQ ID No 825 |
| RRLASHLGLCGMKIRFLSCQRSPAAAILELFEEQNGSLQELHYLMTVME | |
| RLDCASAIQNYLSGTHGGSPGPERGGARDNQGLELDEKL | |
| ENSEIYDYLRQGNRLKQPADCLDGLYALMSRCWELNPQDRPSFTELRE | SEQ ID No 826 |
| DLENTLKALPPAQEPDEILYVNMDEGGGYPEPPGAAGGADPPTQPDPK | |
| DSCSCLTAAEVHPAGRYVLCPSTTPSPAQPADRGSPAAPGQEDGA | |
| TRWRRNEDGAICRKSIKKMLEVLVVKLPLSEHWALPGGSREPGEMLPR | SEQ ID No 827 |
| KLKRILRQEHWPSFENLLKCGMEVYKGYMDDPRNTDNAWIETVAVSVH | |
| FQDQNDVELNRLNSNLHACDSGASIRWQVVDRRIPLYANHKTLLQKAAA | |
| EFGAHY | |
| WSFGVVLWEIATLAEQPYQGLSNEQVLRFVMEGGLLDKPDNCPDMLFE | SEQ ID No 828 |
| LMRMCWQYNPKMRPSFLEIISSIKEEMEPGFREVSFYYSEENKLPEPEE | |
| LDLEPENMESVPLDPSASSSSLPLPDRHSGHKAENGPGPGVLVLRASFD | |
| ERQPYAHMNGGRKNERALPLPQSSTC | |
| KSGYRMAKPDHATSEVYEIMVKCWNSEPEKRPSFYHLSEIVENLLPGQY | SEQ ID No 829 |
| KKSYEKIHLDFLKSDHPAVARMRVDSDNAYIGVTYKNEEDKLKDWEGGL | |
| DEQRLSADSGYIIPLPDIDPVPEEEDLGKRNRHSSQTSEESAIETGSSSS | |
| TFIKREDETIEDIDMMDDIGIDSSDLVEDSFL | |
| QNHEMYDYLLHGHRLKQPEDCLDELYEIMYSCWRTDPLDRPTFSVLRL | SEQ ID No 830 |
| QLEKLLESLPDVRNQADVIYVNTQLLESSEGLAQGSTLAPLDLNIDPDSII | |
| ASCTPRAAISVVTAEVHDSKPHEGRYILNGGSEEWEDLTSAPSAAVTAE | |
| KNSVLPGERLVRNGVSWSHSSMLPLGSSLPDELLFADDSSEGSEVLM | |
| CETLQFLDCICGSTTGGLGLLGLYINEKNVALINQTLESLTEYCQGPCHE | SEQ ID No 831 |
| NQNCIATHESNGIDIITALILNDINPLGKKRMDLVLELKNNASKLLLAIMESR | |
| HDSENAERILYNMRPKELVEVIKKAYMQGEVEFEDGENGEDGAASPRN | |
| VGHNIYILAHQLARHNKELQSMLKPGGQVDGDEALEFYAKHTAQIEIVRL | |
| DRTMEQIVFPVPSICEFLTKESKLRIYYTTERDEQGSKINDFFLRSEDLFN | |
| EMNWQKKLRAQPVLYWCARNMS | |
| CETLQFLDCICGSTTGGLGLLGLYINEKNVALVNQNLESLTEYCQGPCHE | SEQ ID No 832 |
| NQTCIATHESNGIDIIIALILNDINPLGKYRMDLVLQLKNNASKLLLAIMESR | |
| HDSENAERILFNMRPRELVDVMKNAYNQGLECDHGDDEGGDDGVSPK | |
| DVGHNIYILAHQLARHNKLLQQMLKPGSDPDEGDEALKYYANHTAQIEIV | |
| RHDRTMEQIVFPVPNICEYLTRESKCRVFNTTERDEQGSKVNDFFQQTE | |
| DLYNEMKWQKKIRNNPALFWFSRHIS | |
| NNSTVSRTSASKYENMIRYTGSPDSLRSRTPMITPDLESGVKMWHLVKN | SEQ ID No 833 |
| HEHGDQKEGDRGSKMVSEIYLTRLLATKGTLQKFVDDLFETIFSTAHRG | |
| SALPLAIKYMFDFLDEQADKHGIHDPHVRHTWKSNCLPLRFWVNMIKNP | |
| QFVFDIHKNSITDACLSVVAQTFMDSCSTSEHRLGKDSPSNKLLYAKDIP | |
| SYKNWVERYYSDIGKMPAISDQDMNAYLAEQSRMHMNEFNTMSALSEI | |
| FSYVGKYSEEILGPLDHDDQCGKQKLAYKLEQVITLMSLDS | |
| CETLQFLDIMCGSTTGGLGLLGLYINEDNVGLVIQTLETLTEYCQGPCHE | SEQ ID No 834 |
| NQTCIVTHESNGIDIITALILNDISPLCKYRMDLVLQLKDNASKLLLALMES | |
| RHDSENAERILISLRPQELVDVIKKAYLQEEERENSEVSPREVGHNIYILA | |
| LQLSRHNKQLQHLLKPVKRIQEEEAEGISSMLSLNNKQLSQMLKSSAPA | |
| QEEEEDPLAYYENHTSQIEIVRQDRSMEQIVFPVPGICQFLTEETKHRLF | |
| TTTEQDEQGSKVSDFFDQSSFLHNEMEWQRKLRSMPLIYWFSRRMT | |
| PYSQRPKAEDMDLEWRQGRMTRIILQDEDVTTKIECDWKRLNSLAHYQ | SEQ ID No 835 |
| VTDGSLVALVPKQVSAYNMANSFTFTRSLSRYESLLRTASSPDSLRSRA | |
| PMITPDQETGTKLWHLVKNHDHADHREGDRGSKMVSEIYLTRLLATKGT | |
| LQKFVDDLFETVFSTAHRGSALPLAIKYMFDFLDEQADQRQISDPDVRHT | |
| WKSNCLPLRFWVNVIKNPQFVFDIHKNSITDACLSVVAQTFMDSCSTSE | |
| HRLGKDSPSNKLLYAKDIPNYKSWVERYYRDIAKMASISDQDMDAYLVE | |
| QSRLHASDFSVLSALNELYFYVTKYRQEILTALDRDASCRKHKLRQKLEQ | |
| IISLVSSDS | |
| DLSNKINEMKTFNSPNLKDGRFVNPSGQPTPYATTQLIQSNLSNNMNNG | SEQ ID No 836 |
| SGDSGEKHWKPLGQQKQEVAPVQYNIVEQNKLNKDYRANDTVPPTIPY | |
| NQSYDQNTGGSYNSSDRGSSTSGSQGHKKGARTPKVPKQGGMNWAD | |
| LLPPPPAHPPPHSNSEEYNISVDESYDQEMPCPVPPARMYLQQDELEEE | |
| EDERGPTPPVRGAASSPAAVSYSHQSTATLTPSPQEELQPMLQDCPEE | |
| TGHMQHQPDRRRQPVSPPPPPRPISPPHTYGYISGPLVSDMDTDAPEE | |
| EEDEADMEVAKMQTRRLLLRGLEQTPASSVGDLESSVTGSMINGWGSA | |
| SEEDNISSGRSSVSSSDGSFFTDADFAQAVAAAAEYAGLKVARRQMQD | |
| AAGRRHFHASQCPRPTSPVSTDSNMSAAVMQKTRPAKKLKHQPGHLR | |
| RETYTDDLPPPPVPPPAIKSPTAQSKTQLEVRPVVVPKLPSMDARTDRS | |
| SDRKGSSYKGREVLDGRQVVDMRTNPGDPREAQEQQNDGKGRGNKA | |
| AKRDLPPAKTHLIQEDILPYCRPTFPTSNNPRDPSSSSSMSSRGSGSRQ | |
| REQANVGRRNIAEMQVLGGYERGEDNNEELEETES | |

TABLE 8
Examples of naturally occurring C-terminal flanking regions
of ITSM only intracellular domains that could vary in length from
1-2890 (Table 8 comprises SEQ ID No 837 to SEQ ID No 925)

| | |
|---|---|
| L | |
| V | |
| PR | |
| RIN | |
| RTQ | |
| SRP | |
| KIHK | SEQ ID No 837 |
| KTSK | SEQ ID No 838 |
| KIHR | SEQ ID No 839 |
| CVRS | SEQ ID No 840 |
| QYSK | SEQ ID No 841 |
| HYTQQ | SEQ ID No 842 |
| LGPKPQG | SEQ ID No 843 |
| LFEENKL | SEQ ID No 844 |
| VKADTYCA | SEQ ID No 845 |
| QTSEPSGT | SEQ ID No 846 |
| QSCALPTDAL | SEQ ID No 847 |
| AKNALLRWRV | SEQ ID No 848 |
| SKNRLLSIKT | SEQ ID No 849 |
| QHIPAQQQDHPE | SEQ ID No 850 |
| AHHRFYTKRLTFWT | SEQ ID No 851 |
| AHHRFYAKRMTLWT | SEQ ID No 852 |
| KHRHWYPFNFVIEQ | SEQ ID No 853 |
| AHHRFYAERLAGWPC | SEQ ID No 854 |
| KAENIIMMETAQTSL | SEQ ID No 855 |
| YVISEEKDECVIATEV | SEQ ID No 856 |
| RKAVPDAVESRYSRTEGSLDGT | SEQ ID No 857 |
| RKPQVVPPPQQNDLEIPESPTYENFT | SEQ ID No |
| | 2028 |
| GKSQPKAQNPARLSRKELENFDVYS | SEQ ID No |
| | 2029 |
| KIHTGQPLRGPGFGLQLEREMSGMVPK | SEQ ID No 858 |
| IYAGFDTKIMKNCGKIHLKRTKLDLLMNKL | SEQ ID No 859 |
| ASALKSHRTRGHGRGDCCGRSLGDSCCFSAK | SEQ ID No 860 |
| FTLVLEEIRQGFFTDEDTHLVKKFTLYVGDNWNKCD | SEQ ID No 861 |
| VFPSGMGTSSPARRGSADGPRSAQPLRPEDGHCSWPL | SEQ ID No 862 |
| PSEDFERTPQSPTLPPAKVAAPNLSRMGAIPVMIPAQSKDGSIV | SEQ ID No 863 |
| LPEDGGPYTNSILFDSDDNIKWVCQDMGLGDSQDFRDYMESLQDQM | SEQ ID No 864 |
| QTSPQPASEDTLTYADLDMVHLNRTPKQPAPKPEPSFSEYASVQVPRK | SEQ ID No 865 |
| SYHASGHSVAYKPGGFKASTGFGSNTKNKKIYDGGARTEDEVQSYPSK | SEQ ID No 866 |
| HDYV | |
| QVGPGAAARWDLCIDQAVVFIEDAIQYRSINHRVDASSMWLYRRYYSNV | SEQ ID No 867 |
| CQR | |
| EGPRKGHLEEEEEDGEEGAETLAHFCPMELRGPEPLGSRPRQPNLIPW | SEQ ID No 868 |
| AAAGRRAAP | |
| QKPGPLQKKLDSFPAQDPCTTIYVAATEPVPESVQETNSITVYASVTLPES | SEQ ID No 869 |
| YSYQPRTNSLSFPKQIAWNQSRTNSIISSQIPLGDNAKENERKTSDEVYD | SEQ ID No 870 |
| EDPFAYSEPL | |
| DPFEMAAYLKDGYRIAQPINCPDELFAVMACCWALDPEERPKFQQLVQ | SEQ ID No 871 |
| CLTEFHAALGAYV | |
| THSNRETEIWTPRENDTITIYSTINHSKESKPTFSRATALDNV | SEQ ID No 872 |
| MKRLIKRYVLKAQVDKENDEVNEGELKEIKQDISSLRYELLEDKSQATEE | SEQ ID No 873 |
| LAILIHKLSEKLNPSMLRCE | |
| PPSHHQLTLPDPSHHGLHSTPDSPAKPEKNGHAKDHPKIAKIFEIQTMPN | SEQ ID No 874 |
| GKTRTSLKTMSRRKLSQQKEKKATQ | |
| IRQPVGRIFFAGTETATKWSGYMEGAVEAGERAAREVLNGLGKVTEKDI | SEQ ID No 875 |
| WVQEPESKDVPAVEITHTFWERNLPS | |
| FNLQGKTPVSQKEESSATIYCSIRKPQVVPPPQQNDLEIPESPTYENFT | SEQ ID No 876 |
| LRQPVDRIYFAGTETATHWSGYMEGAVEAGERAAREILHAMGKIPEDEI | SEQ ID No 877 |
| WQSEPESVDVPAQPITTTFLERHLPSV | |
| PHTNRTILKEDPANTVYSTVEIPKKMENPHSLLTMPDTPRLFAYENVI | SEQ ID No 878 |
| MKRLIKRYVLKAQVDRENDEVNEGELKEIKQDISSLRYELLEEKSQATGE | SEQ ID No 879 |
| LADLIQQLSEKFGKNLNKDHLRVNKGKDI | |
| LFYRRRNSPVERPPRAGHSEHHPDLGPAAEAAASQASRIWQELEAEEE | SEQ ID No 880 |
| PVPEGSGPLGPWGPQDWVGPLPRGPTTPDEGCLRY | |
| ANLTASDVMNRVNLGYLQDEMNDHQNTLSYVLINPPPDTRLEPSDIVYLI | SEQ ID No 881 |
| RSDPLAHVASSSQSRKSSCSHKLSSCNPETRDETQL | |
| MASRNTQPAESRIYDEILQSKVLPSKEEPVNTVYSEVQFADKMGKASTQ | SEQ ID No 882 |
| DSKPPGTSSYEIVI | |
| ENVPPLRWKEFVRRLGLSDHEIDRLELQNGRCLREAQYSMLATWRRRT | SEQ ID No 883 |
| PRREATLELLGRVLRDMDLLGCLEDIEEALCGPAALPPAPSLLR | |
| LIGDFLRACFVRFCNYCWCWDLEYGYPSYTEFDISGNVLALIFNQGMIW | SEQ ID No 884 |
| MGSFFAPSLPGINILRLHTSMYFQCWAVMCCNVPEARVFKASRSNN | |
| ESTESQILVGIVQRAQLVQALQAEPPSRAPGHQQCLQDILARGCPTEPV | SEQ ID No 885 |
| TLTLFSETTLHQAQNLFKLLNLQSLFVTSRGRAVGCVSWVEMKKAISNLT | |
| NPPAPK | |
| AKTIKDVFHNHGIHATTIQPEFASVGSKSSVVPCELACRTQCALKQCCGT | SEQ ID No 886 |
| LPQAPSGKDAEKTPAVSISCLELSNNLEKKPRRTKAENIPAVVIEIKNMPN | |
| KQPESSL | |
| TPSSPLATLLQHENPSHFELVVFLSAMQEGTGEICQRRTSYLPSEIMLHH | SEQ ID No 887 |
| CFASLLTRGSKGEYQIKMENFDKTVPEFPTPLVSKSPNRTDLDIHINGQSI | |
| DNFQISETGLTE | |
| GGRTMLPIRWMPPESILYRKFTTESDVWSFGVVLWEIFTYGKQPWYQLS | SEQ ID No 888 |
| NTEAIDCITQGRELERPRACPPEVYAIMRGCWQREPQQRHSIKDVHARL | |
| QALAQAPPVYLDVLG | |
| GGHTMLPIRWMPPESIMYRKFTTESDVWSLGVVLWEIFTYGKQPWYQL | SEQ ID No 889 |
| SNNEVIECITQGRVLQRPRTCPQEVYELMLGCWQREPHMRKNIKGIHTL | |
| LQNLAKASPVYLDILG | |
| LNPPPSPATDPSLYNMDMFYSSNIPATARPYRPYIIRGMAPPTTPCSTDV | SEQ ID No 890 |
| CDSDYSASRWKASKYYLDLNSDSDPYPPPPTPHSQYLSAEDSCPPSPA | |
| TERSYFHLFPPPPSPCTDSS | |
| DHNSPFFHMAAETLLQQDFELVVFLDGTVESTSATCQVRTSYVPEEVLW | SEQ ID No 891 |
| GYRFAPIVSKTKEGKYRVDFHNFSKTVEVETPHCAMCLYNEKDVRARM | |
| KRGYDNPNFILSEVNETDDTKM | |
| DETSPLKDLPLRSGEGDFELVLILSGTVESTSATCQVRTSYLPEEILWGY | SEQ ID No 892 |
| EFTPAISLSASGKYIADFSLFDQVVKVASPSGLRDSTVRYGDPEKLKLEE | |
| SLREQAEKEGSALSVRISNV | |
| LRFQASEEESWAAPPPVSQPPPCNRLPPELFEQLRMLLEPNSITGNDW | SEQ ID No 893 |
| RRLASHLGLCGMKIRFLSCQRSPAAAILELFEEQNGSLQELHYLMTVME | |
| RLDCASAIQNYLSGTHGGSPGPERGGARDNQGLELDEKL | |
| TRWRRNEDGAICRKSIKKMLEVLVVKLPLSEHWALPGGSREPGEMLPR | SEQ ID No 894 |
| KLKRILRQEHWPSFENLLKCGMEVYKGYMDDPRNTDNAWIETVAVSVH | |
| FQDQNDVELNRLNSNLHACDSGASIRWQVVDRRIPLYANHKTLLQKAAA | |
| EFGAHY | |
| ENAEIYNYLIGGNRLKQPPECMEDVYDLMYQCWSADPKQRPSFTCLRM | SEQ ID No 895 |
| ELENILGQLSVLSASQDPLYINIERAEEPTAGGSLELPGRDQPYSGAGDG | |
| SGMGAVGGTPSDCRYILTPGGLAEQPGQAEHQPESPLNETQRLLLLQQ | |
| GLLPHSSC | |
| WSFGVVLWEIATLAEQPYQGLSNEQVLRFVMEGGLLDKPDNCPDMLFE | SEQ ID No 896 |
| LMRMCWQYNPKMRPSFLEIISSIKEEMEPGFREVSFYYSEENKLPEPEE | |
| LDLEPENMESVPLDPSASSSSLPLPDRHSGHKAENGPGPGVLVLRASFD | |
| ERQPYAHMNGGRKNERALPLPQSSTC | |
| KSGYRMAKPDHATSEVYEIMVKCWNSEPEKRPSFYHLSEIVENLLPGQY | SEQ ID No 897 |
| KKSYEKIHLDFLKSDHPAVARMRVDSDNAYIGVTYKNEEDKLKDWEGGL | |
| DEQRLSADSGYIIPLPDIDPVPEEEDLGKRNRHSSQTSEESAIETGSSSS | |
| TFIKREDETIEDIDMMDDIGIDSSDLVEDSFL | |
| QNHEMYDYLLHGHRLKQPEDCLDELYEIMYSCWRTDPLDRPTFSVLRL | SEQ ID No 898 |
| QLEKLLESLPDVRNQADVIYVNTQLLESSEGLAQGSTLAPLDLNIDPDSII | |
| ASCTPRAAISVVTAEVHDSKPHEGRYILNGGSEEWEDLTSAPSAAVTAE | |
| KNSVLPGERLVRNGVSWSHSSMLPLGSSLPDELLFADDSSEGSEVLM | |
| PDPYKSSILSLIKFKENPHLIIMNVSDCIPDAIEVVSKPEGTKIQFLGTRKSL | SEQ ID No 899 |
| TETELTKPNYLYLLPTEKNHSGPGPCICFENLTYNQAASDSGSCGHVPV | |
| SPKAPSMLGLMTSPENVLKALEKNYMNSLGEIPAGETSLNYVSQLASPM | |
| FGDKDSLPTNPVEAPHCSEYKMQMAVSLRLALPPPTENSSLSSITLLDP | |
| GEHYC | |
| PNPENCKALQFQKSVCEGSSALKTLEMNPCTPNNVEVLETRSAFPKIED | SEQ ID No 900 |
| TEIISPVAERPEDRSDAEPENHVVVSYCPPIIEEEIPNPAADEAGGTAQVI | |
| YIDVQSMYQPQAKPEEEQENDPVGGAGYKPQMHLPINSTVEDIAAEEDL | |
| DKTAGYRPQANVNTWNLVSPDSPRSIDSNSEIVSFGSPCSINSRQFLIPP | |
| KDEDSPKSNGGGWSFTNFFQNKPND | |
| RDVKKGNLPPDYRISLIDIGLVIEYLMGGAYRCNYTRKRFRTLYHNLFGP | SEQ ID No 901 |
| KRPKALKLLGMEDDIPLRRGRKTTKKREEEVDIDLDDPEINHFPFPFHEL | |
| MVWAVLMKRQKMALFFWQHGEEAMAKALVACKLCKAMAHEASENDM | |
| VDDISQELNHNSRDFGQLAVELLDQSYKQDEQLAMKLLTYELKNWSNAT | |
| CLQLAVAAKHRDFIAHTCSQMLLTDMWMGRLRMRK | |
| KDLKTRRNHEQEQTFPGGGSTIYSMIQSQSSAPTSQEPAYTLYSLIQPSR | SEQ ID No 902 |
| KSGSRKRNHSPSFNSTIYEVIGKSQPKAQNPARLSRKELENFDVYS | |
| GNANAAKPDLDKVISLKEANVKLRANALIKRGSMYMQQQQPLLSTQDFN | SEQ ID No 903 |
| MAADIDPQNADVYHHRGQLKILLDQVEEAVADFDECIRLRPESALAQAQ | |
| KCFALYRQAYTGNNSSQIQAAMKGFEEVIKKFPRCAEGYALYAQALTDQ | |
| QQFGKADEMYDKCIDLEPDNATTYVHKGLLQLQWKQDLDRGLELISKAI | |
| EIDNKCDFAYETMGTIEVQRGNMEKAIDMFNKAINLAKSEMEMAHLYSLC | |
| DAAHAQTEVAKKYGLKPPTL | |
| ENEAPWVTDKRPPPDWPSKGKIQFNNYQVRYRPELDLVLRGITCDIGSM | SEQ ID No 904 |
| EKIGVVGRTGAGKSSLTNCLFRILEAAGGQIIIDGVDIASIGLHDLREKLTII | |
| PQDPILFSGSLRMNLDPFNNYSDEEIWKALELAHLKSFVASLQLGLSHEV | |
| TEAGGNLSIGQRQLLCLGRALLRKSKILVLDEATAAVDLETDNLIQTTIQN | |
| EFAHCTVITIAHRLHTIMDSDKVMVLDNGKIIECGSPEELLQIPGPFYFMA | |
| KEAGIENVNSTKF | |
| CETLQFLDCICGSTTGGLGLLGLYINEKNVALINQTLESLTEYCQGPCHE | SEQ ID No 905 |
| NQNCIATHESNGIDIITALILNDINPLGKKRMDLVLELKNNASKLLLAIMESR | |
| HDSENAERILYNMRPKELVEVIKKAYMQGEVEFEDGENGEDGAASPRN | |
| VGHNIYILAHQLARHNKELQSMLKPGGQVDGDEALEFYAKHTAQIEIVRL | |
| DRTMEQIVFPVPSICEFLTKESKLRIYYTTERDEQGSKINDFFLRSEDLFN | |
| EMNWQKKLRAQPVLYWCARNMS | |
| CETLQFLDCICGSTTGGLGLLGLYINEKNVALVNQNLESLTEYCQGPCHE | SEQ ID No 906 |
| NQTCIATHESNGIDIIIALILNDINPLGKYRMDLVLQLKNNASKLLLAIMESR | |
| HDSENAERILFNMRPRELVDVMKNAYNQGLECDHGDDEGGDDGVSPK | |
| DVGHNIYILAHQLARHNKLLQQMLKPGSDPDEGDEALKYYANHTAQIEIV | |
| RHDRTMEQIVFPVPNICEYLTRESKCRVFNTTERDEQGSKVNDFFQQTE | |
| DLYNEMKWQKKIRNNPALFWFSRHIS | |
| NNSTVSRTSASKYENMIRYTGSPDSLRSRTPMITPDLESGVKMWHLVKN | SEQ ID No 907 |
| HEHGDQKEGDRGSKMVSEIYLTRLLATKGTLQKFVDDLFETIFSTAHRG | |
| SALPLAIKYMFDFLDEQADKHGIHDPHVRHTWKSNCLPLRFWVNMIKNP | |
| QFVFDIHKNSITDACLSWAQTFMDSCSTSEHRLGKDSPSNKLLYAKDIP | |
| SYKNWVERYYSDIGKMPAISDQDMNAYLAEQSRMHMNEFNTMSALSEI | |
| FSYVGKYSEEILGPLDHDDQCGKQKLAYKLEQVITLMSLDS | |
| CETLQFLDIMCGSTTGGLGLLGLYINEDNVGLVIQTLETLTEYCQGPCHE | SEQ ID No 908 |
| NQTCIVTHESNGIDIITALILNDISPLCKYRMDLVLQLKDNASKLLLALMES | |
| RHDSENAERILISLRPQELVDVIKKAYLQEEERENSEVSPREVGHNIYILA | |
| LQLSRHNKQLQHLLKPVKRIQEEEAEGISSMLSLNNKQLSQMLKSSAPA | |
| QEEEEDPLAYYENHTSQIEIVRQDRSMEQIVFPVPGICQFLTEETKHRLF | |
| TTTEQDEQGSKVSDFFDQSSFLHNEMEWQRKLRSMPLIYWFSRRMT | |
| LADGSFVRCTPSENSDLFYAVPWSCGTLGFLVAAEIRIIPAKKYVKLRFEP | SEQ ID No 909 |
| VRGLEAICAKFTHESQRQENHFVEGLLYSLDEAVIMTGVMTDEAEPSKL | |
| NSIGNYYKPWFFKHVENYLKTNREGLEYIPLRHYYHRHTRSIFWELQDIIP | |
| FGNNPIFRYLFGWMVPPKISLLKLTQGETLRKLYEQHHVVQDMLVPMKC | |
| LQQALHTFQNDIHVYPIWLCPFILPSQPGLVHPKGNEAELYIDIGAYGEPR | |
| VKHFEARSCMRQLEKFVRSVHGFQMLYADCYMNREEFWEMFDGSLYH | |
| KLREKLGCQDAFPEVYDKICKAARH | |
| NPEYFSASDMYVPDEWEVPREQISIIRELGQGSFGMVYEGLARGLEAGE | SEQ ID No 910 |
| ESTPVALKTVNELASPRECIEFLKEASVMKAFKCHHWRLLGVVSQGQP | |
| TLVIMELMTRGDLKSHLRSLRPEAENNPGLPQPALGEMIQMAGEIADGM | |
| AYLAANKFVHRDLAARNCMVSQDFTVKIGDFGMTRDVYETDYYRKGGK | |
| GLLPVRWMAPESLKDGIFTTHSDVWSFGVVLWEIVTLAEQPYQGLSNEQ | |
| VLKFVMDGGVLEELEGCPLQLQELMSRCWQPNPRLRPSFTHILDSIQEE | |
| LRPSFRLLSFYYSPECRGARGSLPTTDAEPDSSPTPRDCSPQNGGPGH | |
| PAPSALTPKILDLLVHAISINSAYTTKILPPEKEGALPRQVGNKTECALLGF | SEQ ID No 911 |
| VLDLKRDFQPVREQIPEDKLYKVYTFNSVRKSMSTVIRMPDGGFRLFSK | |
| GASEILLKKCTNILNSNGELRGFRPRDRDDMVRKIIEPMACDGLRTICIAY | |
| RDFSAGQEPDWDNENEVVGDLTCIAVVGIEDPVRPEVPEAIRKCQRAGI | |
| TVRMVTGDNINTARAIAAKCGIIQPGEDFLCLEGKEFNRRIRNEKGEIEQE | |
| RLDKVWPKLRVLARSSPTDKHTLVKGIIDSTTGEQRQVVAVTGDGTNDG | |
| PALKKADVGFAMGIAGTDVAKEASDIILTDDNFTSIVKAVMWGRNVYDSI | |
| GGDQLNCHFGSILHTTGLQYRDFIHVSFHDKVYELPFLVALDHRKESVVV | SEQ ID No 912 |
| AVRGTMSLQDVLTDLSAESEVLDVECEVQDRLAHKGISQAARYVYQRLI | |
| NDGILSQAFSIAPEYRLVIVGHSLGGGAAALLATMLRAAYPQVRCYAFSP | |
| PRGLWSKALQEYSQSFIVSLVLGKDVIPRLSVTNLEDLKRRILRVVAHCN | |
| KPKYKILLHGLWYELFGGNPNNLPTELDGGDQEVLTQPLLGEQSLLTRW | |
| SPAYSFSSDSPLDSSPKYPPLYPPGRIIHLQEEGASGRFGCCSAAHYSA | |
| KWSHEAEFSKILIGPKMLTDHMPDILMRALDSVVSDRAACVSCPAQGVS | |
| SVDVA | |
| PYSQRPKAEDMDLEWRQGRMTRIILQDEDVTTKIECDWKRLNSLAHYQ | SEQ ID No 913 |
| VTDGSLVALVPKQVSAYNMANSFTFTRSLSRYESLLRTASSPDSLRSRA | |
| PMITPDQETGTKLWHLVKNHDHADHREGDRGSKMVSEIYLTRLLATKGT | |
| LQKFVDDLFETVFSTAHRGSALPLAIKYMFDFLDEQADQRQISDPDVRHT | |
| WKSNCLPLRFWVNVIKNPQFVFDIHKNSITDACLSVVAQTFMDSCSTSE | |
| HRLGKDSPSNKLLYAKDIPNYKSWVERYYRDIAKMASISDQDMDAYLVE | |
| QSRLHASDFSVLSALNELYFYVTKYRQEILTALDRDASCRKHKLRQKLEQ | |
| IISLVSSDS | |
| KSDAAMTVAVKMLKPSAHLTEREALMSELKVLSYLGNHMNIVNLLGACTI | SEQ ID No 914 |
| GGPTLVITEYCCYGDLLNFLRRKRDSFICSKQEDHAEAALYKNLLHSKES | |
| SCSDSTNEYMDMKPGVSYVVPTKADKRRSVRIGSYIERDVTPAIMEDDE | |
| LALDLEDLLSFSYQVAKGMAFLASKNCIHRDLAARNILLTHGRITKICDFG | |
| LARDIKNDSNYVVKGNARLPVKWMAPESIFNCVYTFESDVWSYGIFLWE | |
| LFSLGSSPYPGMPVDSKFYKMIKEGFRMLSPEHAPAEMYDIMKTCWDA | |
| DPLKRPTFKQIVQLIEKQISESTNHIYSNLANCSPNRQKPVVDHSVRINSV | |
| GSTASSSQPLLVHDDV | |
| HVPKSYRRRRRHKRKTGHKEKKEKERISENYSDKSDIENADESSSSILKP | SEQ ID No 915 |
| LISPAAERIRFILGEEDDSPAPPQLFTELDELLAVDGQEMEWKETARWIK | |
| FEEKVEQGGERWSKPHVATLSLHSLFELRTCMEKGSIMLDREASSLPQL | |
| VEMIVDHQIETGLLKPELKDKVTYTLLRKHRHQTKKSNLRSLADIGKTVSS | |
| ASRMFTNPDNGSPAMTHRNLTSSSLNDISDKPEKDQLKNKFMKKLPRD | |
| AEASNVLVGEVDFLDTPFIAFVRLQQAVMLGALTEVPVPTRFLFILLGPKG | |
| KAKSYHEIGRAIATLMSDEVFHDIAYKAKDRHDLIAGIDEFLDEVIVLPPGE | |
| WDPAIRIEPPKSLPSSDKRKNMYSGGENVQMNGDTPHDGGHGGGGHG | |
| DCEELQRTGRFCGGLIKDIKRKAPFFASDFYDALNIQ | |
| WIPDGENVKIPVAIKVLRENTSPKANKEILDEAYVMAGVGSPYVSRLLGIC | SEQ ID No 916 |
| LTSTVQLVTQLMPYGCLLDHVRENRGRLGSQDLLNWCMQIAKGMSYLE | |
| DVRLVHRDLAARNVLVKSPNHVKITDFGLARLLDIDETEYHADGGKVPIK | |
| WMALESILRRRFTHQSDVWSYGVTVWELMTFGAKPYDGIPAREIPDLLE | |
| KGERLPQPPICTIDVYMIMVKCWMIDSECRPRFRELVSEFSRMARDPQR | |
| FVVIQNEDLGPASPLDSTFYRSLLEDDDMGDLVDAEEYLVPQQGFFCPD | |
| PAPGAGGMVHHRHRSSSTRSGGGDLTLGLEPSEEEAPRSPLAPSEGA | |
| GSDVFDGDLGMGAAKGLQSLPTHDPSPLQRYSEDPTVPLPSETDGYVA | |
| PLTCSPQPEYVNQPDVRPQPPSPREGPLPAARPAGATLERPKTLSPGK | |
| NGVVKDVFAFGGAVENPEYLTPQGGAAPQPHPPPAFSPAFDNLYYWD | |
| QDPPERGAPPSTFKGTPTAENPEYLGLDVPV | |
| IMDPDEVPLDEQCERLPYDASKWEFARERLKLGKSLGRGAFGKVVQAS | SEQ ID No 917 |
| AFGIKKSPTCRTVAVKMLKEGATASEYKALMTELKILTHIGHHLNVVNLLG | |
| ACTKQGGPLMVIVEYCKYGNLSNYLKSKRDLFFLNKDAALHMEPKKEKM | |
| EPGLEQGKKPRLDSVTSSESFASSGFQEDKSLSDVEEEEDSDGFYKEPI | |
| TMEDLISYSFQVARGMEFLSSRKCIHRDLAARNILLSENNVVKICDFGLAR | |
| DIYKNPDYVRKGDTRLPLKWMAPESIFDKIYSTKSDVWSYGVLLWEIFSL | |
| GGSPYPGVQMDEDFCSRLREGMRMRAPEYSTPEIYQIMLDCWHRDPK | |
| ERPRFAELVEKLGDLLQANVQQDGKDYIPINAILTGNSGFTYSTPAFSED | |
| FFKESISAPKFNSGSSDDVRYVNAFKFMSLERIKTFEELLPNATSMFDDY | |
| QGDSSTLLASPMLKRFTWTDSKPKASLKIDLRVTSKSKESGLSDVSRPS | |
| FCHSSCGHVSEGKRRFTYDHAELERKIACCSPPPDYNSVVLYSTPPI | |
| IMDPGEVPLEEQCEYLSYDASQWEFPRERLHLGRVLGYGAFGKVVEAS | SEQ ID No 918 |
| AFGIHKGSSCDTVAVKMLKEGATASEHRALMSELKILIHIGNHLNVVNLLG | |
| ACTKPQGPLMVIVEFCKYGNLSNFLRAKRDAFSPCAEKSPEQRGRFRA | |
| MVELARLDRRRPGSSDRVLFARFSKTEGGARRASPDQEAEDLWLSPLT | |
| MEDLVCYSFQVARGMEFLASRKCIHRDLAARNILLSESDVVKICDFGLAR | |
| DIYKDPDYVRKGSARLPLKWMAPESIFDKVYTTQSDVWSFGVLLWEIFS | |
| LGASPYPGVQINEEFCQRLRDGTRMRAPELATPAIRRIMLNCWSGDPKA | |
| RPAFSELVEILGDLLQGRGLQEEEEVCMAPRSSQSSEEGSFSQVSTMAL | |
| HIAQADAEDSPPSLQRHSLAARYYNWVSFPGCLARGAETRGSSRMKTF | |
| EEFPMTPTTYKGSVDNQTDSGMVLASEEFEQIESRHRQESGFSCKGPG | |
| QNVAVTRAHPDSQGRRRRPERGARGGQVFYNSEYGELSEPSEEDHCS | |
| PSARVTFFTDNSY | |
| VMDPDELPLDEHCERLPYDASKWEFPRDRLKLGKPLGRGAFGQVIEAD | SEQ ID No 919 |
| AFGIDKTATCRTVAVKMLKEGATHSEHRALMSELKILIHIGHHLNVVNLLG | |
| ACTKPGGPLMVIVEFCKFGNLSTYLRSKRNEFVPYKTKGARFRQGKDYV | |
| GAIPVDLKRRLDSITSSQSSASSGFVEEKSLSDVEEEEAPEDLYKDFLTL | |
| EHLICYSFQVAKGMEFLASRKCIHRDLAARNILLSEKNVVKICDFGLARDI | |
| YKDPDYVRKGDARLPLKWMAPETIFDRVYTIQSDVWSFGVLLWEIFSLG | |
| ASPYPGVKIDEEFCRRLKEGTRMRAPDYTTPEMYQTMLDCWHGEPSQ | |
| RPTFSELVEHLGNLLQANAQQDGKDYIVLPISETLSMEEDSGLSLPTSPV | |
| SCMEEEEVCDPKFHYDNTAGISQYLQNSKRKSRPVSVKTFEDIPLEEPE | |
| VKVIPDDNQTDSGMVLASEELKTLEDRTKLSPSFGGMVPSKSRESVASE | |
| GSNQTSGYQSGYHSDDTDTTVYSSEEAELLKLIEIGVQTGSTAQILQPDS | |
| GTTLSSPPV | |
| FEPTVERGELVVRYRVRKSYSRRTTEATLNSLGISEELKEKLRDVMVDR | SEQ ID No 920 |
| HKVALGKTLGEGEFGAVMEGQLNQDDSILKVAVKTMKIAICTRSELEDFL | |
| SEAVCMKEFDHPNVMRLIGVCFQGSERESFPAPVVILPFMKHGDLHSFL | |
| LYSRLGDQPVYLPTQMLVKFMADIASGMEYLSTKRFIHRDLAARNCMLN | |
| ENMSVCVADFGLSKKIYNGDYYRQGRIAKMPVKWIAIESLADRVYTSKS | |
| DVWSFGVTMWEIATRGQTPYPGVENSEIYDYLRQGNRLKQPADCLDGL | |
| YALMSRCWELNPQDRPSFTELREDLENTLKALPPAQEPDEILYVNMDEG | |
| GGYPEPPGAAGGADPPTQPDPKDSCSCLTAAEVHPAGRYVLCPSTTPS | |
| PAQPADRGSPAAPGQEDGA | |
| WVPEGETVKIPVAIKILNETTGPKANVEFMDEALIMASMDHPHLVRLLGV | SEQ ID No 921 |
| CLSPTIQLVTQLMPHGCLLEYVHEHKDNIGSQLLLNWCVQIAKGMMYLE | |
| ERRLVHRDLAARNVLVKSPNHVKITDFGLARLLEGDEKEYNADGGKMPI | |
| KWMALECIHYRKFTHQSDVWSYGVTIWELMTFGGKPYDGIPTREIPDLL | |
| EKGERLPQPPICTIDVYMVMVKCWMIDADSRPKFKELAAEFSRMARDPQ | |
| RYLVIQGDDRMKLPSPNDSKFFQNLLDEEDLEDMMDAEEYLVPQAFNIP | |
| PPIYTSRARIDSNRSEIGHSPPPAYTPMSGNQFVYRDGGFAAEQGVSVP | |
| YRAPTSTIPEAPVAQGATAEIFDDSCCNGTLRKPVAPHVQEDSSTQRYS | |
| ADPTVFAPERSPRGELDEEGYMTPMRDKPKQEYLNPVEENPFVSRRKN | |
| GDLQALDNPEYHNASNGPPKAEDEYVNEPLYLNTFANTLGKAEYLKNNI | |
| LSMPEKAKKAFDNPDYWNHSLPPRSTLQHPDYLQEYSTKYFYKQNGRI | |
| RPIVAENPEYLSEFSLKPGTVLPPPPYRHRNTVV | |
| DLSNKINEMKTFNSPNLKDGRFVNPSGQPTPYATTQLIQSNLSNNMNNG | SEQ ID No 922 |
| SGDSGEKHWKPLGQQKQEVAPVQYNIVEQNKLNKDYRANDTVPPTIPY | |
| NQSYDQNTGGSYNSSDRGSSTSGSQGHKKGARTPKVPKQGGMNWAD | |
| LLPPPPAHPPPHSNSEEYNISVDESYDQEMPCPVPPARMYLQQDELEEE | |
| EDERGPTPPVRGAASSPAAVSYSHQSTATLTPSPQEELQPMLQDCPEE | |
| TGHMQHQPDRRRQPVSPPPPPRPISPPHTYGYISGPLVSDMDTDAPEE | |
| EEDEADMEVAKMQTRRLLLRGLEQTPASSVGDLESSVTGSMINGWGSA | |
| SEEDNISSGRSSVSSSDGSFFTDADFAQAVAAAAEYAGLKVARRQMQD | |
| AAGRRHFHASQCPRPTSPVSTDSNMSAAVMQKTRPAKKLKHQPGHLR | |
| RETYTDDLPPPPVPPPAIKSPTAQSKTQLEVRPVVVPKLPSMDARTDRS | |
| SDRKGSSYKGREVLDGRQVVDMRTNPGDPREAQEQQNDGKGRGNKA | |
| AKRDLPPAKTHLIQEDILPYCRPTFPTSNNPRDPSSSSSMSSRGSGSRQ | |
| REQANVGRRNIAEMQVLGGYERGEDNNEELEETES | |
| EPQDGCHPGDSVERSVTCLPSASDENENQLDGDGHEHLTSSDSAMGK | SEQ ID No 923 |
| PQVSEQDSLNNNESCTLSCEVAAGENLQNTLCEASRDEQAFLGKDKKIP | |
| GKRSPRSKKGTAKKIPPGLFSGDIAPLMQEKVLSAVTYAVDDEEAAEVN | |
| ANEQPEAPKLVLQSLFSLIRGEVEQLDSRALPLCLHQIAESYFQEEDYEK | |
| AMKFIQLERLYHEQLLANLSAIQEQWETKWKTVQPHTVTALRNSEKGFN | |
| GEDFERLTKICATHQDPLLSKHKIAAVEKSQERKCSTQLLVSEDPKEGGA | |
| TTKESESKTCLGTESSKESQHTVEPLGSSPCCHQMDVQTDSPSLSVTA | |
| GKDHMEELLCSAEATLALHTQSSETAGSPSGPDSSEDACEDDSRLQLA | |
| QTEACQDVARIEGIAEDPKVFLSSKSKTEPLISPGCDRIPPALISEGKYSQ | |
| AQRKELRLPLRDASEALPTDQLENNELNELQQPDLTDSDGKSPQAQAD | |
| SDGSENVLCGNNQISDLGILLPEVCMAPEEKGDKDDQLNKETEDYLNSL | |
| LEGCLKDTEDSLSYEDNQDDDSDLLQDLSPEEASYSLQENLPSDESCLS | |
| LDDLAKRIEIAEVVPTEGLVSILKKRNDTVGDHPAQMQHKPSKRRVRFQE | |
| IDDSLDQDEVGGGS | |
| SKNIPTTKDVEPLLEIDGDIRNFEVFLSSRTPVLVARDVKVFLPCTVNLDP | SEQ ID No 924 |
| KLREIIADVRAAREQISIGGLAYPPLPLHEGPPRAPSGYSQPPSVCSSTSF | |
| NGPFAGGVVSPQPHSSYYSGMTGPQHPFYNRPFFAPYLYTPRYYPGG | |
| SQHLISRPSVKTSLPRDQNNGLEVIKEDAAEGLSSPTDSSRGSGPAPGP | |
| VVLLNSLNVDAVCEKLKQIEGLDQSMLPQYCTTIKKANINGRVLAQCNID | |
| ELKKEMNMNFGDWHLFRSTVLEMRNAESHVVPEDPRFLSESSSGPAPH | |
| GEPARRASHNELPHTELSSQTPYTLNFSFEELNTLGLDEGAPRHSNLSW | |
| QSQTRRTPSLSSLNSQDSSIEISKLTDKVQAEYRDAYREYIAQMSQLEG | |
| GPGSTTISGRSSPHSTYYMGQSSSGGSIHSNLEQEKGKDSEPKPDDGR | |
| KSFLMKRGDVIDYSSSGVSTNDASPLDPITEEDEKSDQSGSKLLPGKKS | |
| SERSSLFQTDLKLKGSGLRYQKLPSDEDESGTEESDNTPLLKDDKDRKA | |
| EGKVERVPKSPEHSAEPIRTFIKAKEYLSDALLDKKDSSDSGVRSSESSP | |
| NHSLHNEVADDSQLEKANLIELEDDSHSGKRGIPHSLSGLQDPIIARMSIC | |
| SEDKKSPSECSLIASSPEENWPACQKAYNLNRTPSTVTLNNNSAPANRA | |
| NQNFDEMEGIRETSQVILRPSSSPNPTTIQNENLKSMTHKRSQRSSYTR | |
| LSKDPPELHAAASSESTGFGEERESIL | |
| WSLGVTLWELFDNAAQPYSNLSNLDVLNQVIRERDTKLPKPQLEQPYSD | SEQ ID No 925 |
| RWYEVLQFCWLSPEKRPAAEDVHRLLTYLRLQSQRDSEVDFEQQWNA | |
| LKPNTNSRDSSNNAAFPILDHFARDRLGREMEEVLTVTETSQGLSFEYV | |
| WEAAKHDHFDERSRGHLDEGLSYTSIFYPVEVFESSLSDPGPGKQDDS | |
| GQDVPLRVPGVVPVFDAHNLSVGSDYYIQLEEKSGSNLELDYPPALLTT | |
| DMDNPERTGPELSQLTALRSVELEESSTDEDFFQSSTDPKDSSLPGDLH | |
| VTSGPESPFNNIFNDVDKSEDLPSHQKIFDLMELNGVQADFKPATLSSSL | |
| DNPKESVITGHFEKEKPRKIFDSEPLCLSDNLMHQDNFDPLNVQELSENF | |
| LFLQEKNLLKGSLSSKEHINDLQTELKNAGFTEAMLETSCRNSLDTELQF | |
| AENKPGLSLLQENVSTKGDDTDVMLTGDTLSTSLQSSPEVQVPPTSFET | |
| EETPRRVPPDSLPTQGETQPTCLDVIVPEDCLHQDISPDAVTVPVEILST | |
| DARTHSLDNRSQDSPGESEETLRLTESDSVLADDILASRVSVGSSLPEL | |
| GQELHNKPFSEDHHSHRRLEKNLEAVETLNQLNSKDAAKEAGLVSALSS | |
| DSTSQDSLLEDSLSAPFPASEPSLETPDSLESVDVHEALLDSLGSHTPQK | |
| LVPPDKPADSGYETENLESPEWTLHPAPEGTADSEPATTGDGGHSGLP | |
| PNPVIVISDAGDGHRGTEVTPETFTAGSQGSYRDSAYFSDNDSEPEKRS | |
| EEVPGTSPSALVLVQEQPLPEPVLPEQSPAAQDSCLEARKSQPDESCLS | |
| ALHNSSDLELRATPEPAQTGVPQQVHPTEDEASSPWSVLNAELSSGDD | |
| FETQDDRPCTLASTGTNTNELLAYTNSALDKSLSSHSEGPKLKEPDIEGK | |
| YLGKLGVSGMLDLSEDGMDADEEDENSDDSDEDLRAFNLHSLSSESED | |
| ETEHPVPIILSNEDGRHLRSLLKPTAANAPDPLPEDWKKEKKAVTFFDDV | |
| TVYLFDQETPTKELGPCGGEACGPDLSGPAPASGSPYLSRCINSESSTD | |
| EEGGGFEWDDDFSPDPFMSKTTSNLLSSKPSLQTSKYFSPPPPARSTE | |
| QSWPHSAPYSRFSISPANIASFSLTHLTDSDIEQGGSSEDGEKD | |

[0321] In some embodiments, variants of the sequence ((L1-ITIM-L2)ⁿ-(L3-ITSM-L4)^{m})^{p} have at least 80%, 85%, 90%, 95%, 96%, 97%, 98%, 99% amino acid sequence identity with said sequence.

[0322] In some embodiments, variants of the sequence ((L1-ITIM-L2)ⁿ-(L3-ITSM-L4)^{m})^{p} have at least 95% amino acid sequence identity with said sequence.

[0323] In some embodiments, variants of the sequence ((L1-ITIM-L2)ⁿ-(L3-ITSM-L4)^{m})^{p} have at least 99% amino acid sequence identity with said sequence.

[0324] In some embodiments, variants of the sequence ((L1-ITIM-L2)ⁿ-(L3-ITSM-L4)^{m})^{p} have substantially the same activity as the non-variant sequence. In some embodiments, substantially the same activity refers to at least 80%, 85%, 90%, 95% of the activity of the non-variant sequence.

[0325] In some embodiments, substantially the same activity refers to at least 80%, 85%, 90%, 95% of the activity of the non-variant sequence as measured by monitoring the luciferase activity in reporter cells comprising a P-CAR and an N-CAR comprising the intracellular domain to be tested and incorporating inducible NFAT- or NfkB-regulated luciferase expression, such as for example as disclosed in Example 3 below.

[0326] Transmembrane Domain of the N-CAR

[0327] With respect to the transmembrane domain, in various embodiments, a N-CAR can be designed to comprise a transmembrane domain that is attached to the extracellular domain of the N-CAR. A transmembrane domain can include one or more additional amino acids adjacent to the transmembrane region, e.g., one or more amino acid associated with the extracellular region of the protein from which the transmembrane was derived (e.g., 1, 2, 3, 4, 5, 6, 7, 8, 9, 10 up to 15 amino acids of the extracellular region) and/or one or more additional amino acids associated with the intracellular region of the protein from which the transmembrane protein is derived (e.g., 1, 2, 3, 4, 5, 6, 7, 8, 9, 10 up to 15 amino acids of the intracellular region). In one aspect, the transmembrane domain is one that is associated with one of the other domains of the N-CAR. In some instances, the transmembrane domain can be selected or modified by amino acid substitution to avoid binding of such domains to the transmembrane domains of the same or different surface membrane proteins, e.g., to minimize interactions with other members of the receptor complex. In one aspect, the transmembrane domain is capable of homodimerization with another CAR on the CAR T-cell surface. In a different aspect the amino acid sequence of the transmembrane domain may be modified or substituted so as to minimize interactions with the binding domains of the native binding partner present in the same CAR T-Cell.

[0328] The transmembrane domain may be derived either from a natural or from a recombinant source. Where the source is natural, the domain may be derived from any membrane-bound or transmembrane protein. In one aspect the transmembrane domain is capable of signaling to the intracellular domain(s) whenever the N-CAR has bound to a target. A transmembrane domain of particular use in this invention may include at least the transmembrane region(s) of e.g., the alpha, beta or zeta chain of the T-cell receptor, PD-1, 4-1BB, OX40, ICOS, CTLA-4, LAG3, 2B4, BTLA4, TIM-3, TIGIT, SIRPA, CD28, CD3 epsilon, CD45, CD4, CDS, CD8, CD9, CD16, CD22, CD33, CD37, CD64, CD80, CD86, CD134, CD137, CD154.

[0329] In some embodiment, the transmembrane domain of the N-CAR includes at least the transmembrane region(s) of PD-1 or CD28alpha.

[0330] In some embodiments, the transmembrane domain can be attached to the extracellular domain of the N-CAR, via a hinge, e.g., a hinge from a human protein. For example, in one embodiment, the hinge can be a human Ig (immunoglobulin) hinge, e.g., a PD-1 hinge, an IgG4 hinge, or a CD8alpha hinge.

[0331] In some embodiments, the transmembrane domain may be recombinant, in which case it will comprise predominantly hydrophobic residues such as leucine and valine. In one aspect a triplet of phenylalanine, tryptophan and valine can be found at each end of a recombinant transmembrane domain.

[0332] Optionally, a short oligo- or polypeptide linker, between 2 and 10 amino acids in length may form the linkage between the transmembrane domain and the cytoplasmic region of the N-CAR. A glycine-serine doublet provides a particularly suitable linker. For example, in one aspect, the linker comprises the amino acid sequence of GGGGSGGGGS. In some embodiments, the linker is encoded by a nucleotide sequence of GGTGGCGGAGGTTCTGGAGGTGGAGGTTCC.

[0333] Extracellular domain of the N-CAR

[0334] The antigen binding domain can be any domain that binds to the off-tissue antigen including but not limited to a monoclonal antibody, a recombinant antibody, a human antibody, a humanized antibody, and a functional fragment thereof, including but not limited to a single-domain antibody such as a heavy chain variable domain (VH), a light chain variable domain (VL) and a variable domain (VHH) of camelid derived nanobody, and to an alternative scaffold known in the art to function as antigen binding domain, such as a recombinant fibronectin domain, and the like. In some instances, it is beneficial for the antigen binding domain to be derived from the same species in which the N-CAR will ultimately be used in. For example, for use in humans, it may be beneficial for the antigen binding domain of the N-CAR to comprise human or humanized residues for the antigen binding domain of an antibody or antibody fragment.

[0335] A humanized antibody can be produced using a variety of techniques known in the art, including but not limited to, CDR-grafting (see, e.g., European Patent No. EP 239,400; International Publication No. WO 91/09967; and U.S. Pat. Nos. 5,225,539, 5,530,101, and 5,585,089, each of which is incorporated herein in its entirety by reference), veneering or resurfacing (see, e.g., European Patent Nos. EP 592,106 and EP 519,596; Padlan, 1991, Molecular Immunology, 28(4/5):489-498; Studnicka et al., 1994, Protein Engineering, 7(6):805-814; and Roguska et al., 1994, PNAS, 91:969-973, each of which is incorporated herein by its entirety by reference), chain shuffling (see, e.g., U.S. Pat. No. 5,565,332, which is incorporated herein in its entirety by reference), and techniques disclosed in, e.g., U.S. Patent Application Publication No. US2005/0042664, U.S. Patent Application Publication No. US2005/0048617, U.S. Pat. No. 6,407,213, U.S. Pat. No. 5,766,886, International Publication No. WO 9317105, Tan et al., J. Immunol., 169: 1119-25 (2002), Caldas et al., Protein Eng., 13(5):353-60 (2000), Morea et al., Methods, 20(3):267-79 (2000), Baca et al., J. Biol. Chem., 272(16): 10678-84 (1997), Roguska et al., Protein Eng., 9(10):895-904 (1996), Couto et al., Cancer Res., 55 (23 Supp):5973s-5977s (1995), Couto et al., Cancer Res., 55(8): 1717-22 (1995), Sandhu J S, Gene, 150(2):409-10 (1994), and Pedersen et al., J. Mol. Biol., 235(3):959- 73 (1994), each of which is incorporated herein in its entirety by reference. Often, framework residues in the framework regions will be substituted with the corresponding residue from the CDR donor antibody to alter, for example improve, antigen binding. These framework substitutions are identified by methods well-known in the art, e.g., by modeling of the interactions of the CDR and framework residues to identify framework residues important for antigen binding and sequence comparison to identify unusual framework residues at particular positions. (See, e.g., Queen et al., U.S. Pat. No. 5,585,089; and Riechmann et al., 1988, Nature, 332:323, which are incorporated herein by reference in their entireties.).

[0336] In some aspects, the portion of an N-CAR that comprises an antibody fragment is humanized with retention of high affinity for the target antigen and other favorable biological properties. According to one aspect of the invention, humanized antibodies and antibody fragments are prepared by a process of analysis of the parental sequences and various conceptual humanized products using three-dimensional models of the parental and humanized sequences. Three-dimensional immunoglobulin models are commonly available and are familiar to those skilled in the art. Computer programs are available which illustrate and display probable three-dimensional conformational structures of selected candidate immunoglobulin sequences. Inspection of these displays permits analysis of the likely role of the residues in the functioning of the candidate immunoglobulin sequence, e.g., the analysis of residues that influence the ability of the candidate immunoglobulin to bind the target antigen. In this way, FR residues can be selected and combined from the recipient and import sequences so that the desired antibody or antibody fragment characteristic, such as increased affinity for the target antigen, is achieved. In general, the CDR residues are directly and most substantially involved in influencing antigen binding.

[0337] In some embodiments, the antibody binding domain is a fragment, e.g., a single chain variable fragment (scFv). In some embodiments, the antibody binding domain is a Fv, a Fab, a (Fab′)2, or a bi-functional (e.g. bi-specific) hybrid antibody (e.g., Lanzavecchia et al., Eur. J. Immunol. 17, 105 (1987)). In some embodiments, the antigen binding domain of the N-CAR of the invention binds an off-tissue antigen with wild-type or enhanced affinity.

[0338] In some instances, scFvs can be prepared according to method known in the art (see, for example, Bird et al., (1988) Science 242:423-426 and Huston et al., (1988) Proc. Natl. Acad. Sci. USA 85:5879-5883). ScFv molecules can be produced by linking VH and VL regions together using flexible polypeptide linkers. The scFv molecules comprise a linker (e.g., a Ser-Gly linker) with an optimized length and/or amino acid composition. The linker length can greatly affect how the variable regions of a scFv fold and interact. In fact, if a short polypeptide linker is employed (e.g., between 5-10 amino acids) intrachain folding is prevented. Interchain folding is also required to bring the two variable regions together to form a functional epitope binding site. For examples of linker orientation and size see, e.g., Hollinger et al. 1993 Proc Natl Acad. Sci. U.S.A. 90:6444-6448, U.S. Patent Application Publication Nos. 2005/0100543, 2005/0175606, 2007/0014794, and PCT publication Nos. WO2006/020258 and WO2007/024715, is incorporated herein by reference.

[0339] An scFv can comprise a linker of at least 1, 2, 3, 4, 5, 6, 7, 8, 9, 10, 11, 12, 13, 14, 15, 16, 17, 18, 19, 20, 25, 30, 35, 40, 45, 50, or more amino acid residues between its VL and VH regions. The linker sequence may comprise any naturally occurring amino acid. In some embodiments, the linker sequence comprises amino acids glycine and serine. In another embodiment, the linker sequence comprises sets of glycine and serine repeats such as (Gly₄Ser)ₙ, where n is a positive integer equal to or greater than 1. In one embodiment, the linker can be (Gly₄Ser)₄ or (Gly₄Ser)₃. Variation in the linker length may retain or enhance activity, giving rise to superior efficacy in activity studies.

[0340] In a preferred embodiment, the antigen binding domain of the N-CAR comprises an scFv.

[0341] The off-tissue antigen recognized by the antigen binding domain of the N-CAR is preferably an antigen that is not present or present at low level on the tumour cells targeted by the P-CAR.

[0342] The below table provide examples of combinations of N-CAR and P-CAR antigens.

| P-CAR | |
|---|---|
| Antigen | N-CAR Antigen |
| CD33 | Antigens specifically expressed in dendritic cells and/or haema- |
| | topoetic stem cells such as ITGAX, CD1E, CD34, CD1C, |
| | CD123, CD141 |
| FLT3 | Antigens specifically expressed in haematopoetic stem cells |
| | such as CD34 or specifically expressed in Brain cerebellum such |
| | as ZP2, GABRA6, CRTAM, GRM4, MDGA1 |
| MSLN | Antigens specifically expressed in lung such as SFTPC, ROS1, |
| | SLC6A4, AGTR2 |
| MUC16 | Antigens specifically expressed in salivary gland such as |
| | LRRC26, HTR3A, TMEM211, MRGPRX3 |
| MUC17 | Antigens specifically expressed in colon & small intestine such |
| | as MEP1B, TMIGD1, CEACAM20, ALPI |

[0343] N-CAR antigens could also include antigens that are independent of the antigen that the P-CAR is targeting and that are down-regulated in tumor of interest, but present in all normal tissues of concern. Examples of such antigens for pancreatic ductal adenocarcinoma are TMPRSS11B, CYP17A1 and ATP4B and examples of such antigens for kidney clear cell carcinoma are GP2, MUC21, CLCA4 and SLC27A6.

[0344] The present invention encompasses a recombinant DNA construct comprising sequences encoding an N-CAR as defined above, wherein the N-CAR comprises an extracellular domain such as an antibody fragment that binds specifically to an off-tumor antigen, and wherein the sequence of the extracellular domain is contiguous with and in the same reading frame as a nucleic acid sequence encoding a transmembrane domain and an intracellular domain. In some embodiments, an exemplary N-CAR construct comprises an optional leader sequence, an extracellular off-tissue antigen binding domain, a hinge, a transmembrane domain, and an intracellular inhibitory signaling domain.

[0345] The present invention includes retroviral and lentiviral vector constructs expressing an N-CAR that can be directly transduced into a cell.

[0346] The present invention also includes an RNA construct that can be directly transfected into a cell. A method for generating mRNA for use in transfection involves in vitro transcription (IVT) of a template with specially designed primers, followed by polyA addition, to produce a construct containing 3′ and 5′ untranslated sequence (“UTR”), a 5′ cap and/or Internal Ribosome Entry Site (IRES), the nucleic acid to be expressed, and a polyA tail, typically 50-2000 bases in length. RNA so produced can efficiently transfect different kinds of cells. In one embodiment, the template includes sequences for the N-CAR. In an embodiment, an RNA N-CAR vector is transduced into a T-cell by electroporation.

[0347] In some embodiments, the invention relates to an isolated immune cell comprising an N-CAR as defined herein. In some embodiments, the invention further relates to immune cells comprising an N-CAR as defined herein and a P-CAR. In some embodiments, said immune cell is a T-cell. In some embodiments, said T-cell is a human T-cell.

[0348] The term “positive signaling Chimeric Antigen Receptor” or alternatively a “P-CAR” refers to a recombinant polypeptide construct comprising at least an extracellular domain comprising an antigen binding domain, a transmembrane domain and an intracellular domain (also referred to herein as a “cytoplasmic signaling domain” or “an intracellular signaling domain”) comprising a functional signaling domain derived from a stimulatory molecule as defined below. In some embodiments, the stimulatory molecule is the zeta chain associated with the T-cell receptor complex. In some embodiments, the cytoplasmic signaling domain further comprises one or more functional signaling domains derived from at least one costimulatory molecule as defined below. In some embodiments, the costimulatory molecule is chosen from 4-1BB (i.e., CD137), CD27 and/or CD28. In some embodiments, the P-CAR comprises a chimeric fusion protein comprising an extracellular antigen recognition domain, a transmembrane domain and an intracellular signaling domain comprising a functional signaling domain derived from a stimulatory molecule. In some embodiments, the P-CAR comprises a chimeric fusion protein comprising an extracellular antigen recognition domain, a transmembrane domain and an intracellular signaling domain comprising a functional signaling domain derived from a co- stimulatory molecule and a functional signaling domain derived from a stimulatory molecule. In some embodiments, the P-CAR comprises a chimeric fusion protein comprising an extracellular antigen recognition domain, a transmembrane domain and an intracellular signaling domain comprising two functional signaling domains derived from one or more co- stimulatory molecule(s) and a functional signaling domain derived from a stimulatory molecule. In some embodiments, the P-CAR comprises a chimeric fusion protein comprising an extracellular antigen recognition domain, a transmembrane domain and an intracellular signaling domain comprising at least two functional signaling domains derived from one or more co-stimulatory molecule(s) and a functional signaling domain derived from a stimulatory molecule. In some embodiments the P-CAR comprises an optional leader sequence at the amino-terminus (N-ter) of the P-CAR fusion protein. In some embodiments, the P-CAR further comprises a leader sequence at the N-terminus of the extracellular antigen recognition domain, wherein the leader sequence is optionally cleaved from the antigen recognition domain (e.g., aa scFv) during cellular processing and localization of the P-CAR to the cellular membrane.

[0349] The extracellular portion of a P-CAR comprising an antibody or antibody fragment thereof may exist in a variety of forms where the antigen binding domain is expressed as part of a contiguous polypeptide chain including, for example, a single domain antibody fragment (sdAb), a single chain antibody (scFv) and a humanized antibody (Harlow et al., 1999, In: Using Antibodies: A Laboratory Manual, Cold Spring Harbor Laboratory Press, NY; Harlow et al., 1989, In: Antibodies: A Laboratory Manual, Cold Spring Harbor, New York; Houston et al, 1988, Proc. Natl. Acad. Sci. USA 85:5879-5883; Bird et al., 1988, Science 242:423-426).

[0350] The term “stimulatory molecule,” refers to a molecule expressed by a T-cell that provides the positive cytoplasmic signaling sequence(s) that regulate positive activation of the TCR complex in a stimulatory way for at least some aspect of the T-cell signaling pathway. In some embodiments, the positive signal is initiated by, for instance, binding of a TCR/CD3 complex with an MHC molecule loaded with peptide, and which leads to mediation of a T-cell response, including, but not limited to, proliferation, activation, differentiation, and the like. A positive cytoplasmic signaling sequence (also referred to as a “positive signaling domain” or positive intracellular signaling domain) that acts in a stimulatory manner may contain a signaling motif which is known as immunoreceptor tyrosine- based activation motif or ITAM. Examples of an ITAM containing positive cytoplasmic signaling sequence includes, but is not limited to, those derived from TCR zeta (or CD3zeta), FcR gamma, FcR beta, CD3 gamma, CD3 delta , CD3 epsilon, CD5, CD22, CD79a, CD79b, CD278 (also known as “ICOS”) and CD66d.

[0351] In some aspect, the intracellular signaling domain of the P-CAR can comprise a positive intracellular signaling domain. The positive intracellular signaling domain generates a signal that promotes an immune effector function of the P-CAR containing cell, e.g., a P-CAR T-cell. Examples of immune effector function, e.g., in a P-CAR T-cell, include cytolytic activity and helper activity, including the secretion of cytokines.

[0352] The term “costimulatory molecule” refers to the cognate binding partner on a T-cell that specifically binds with a costimulatory ligand, thereby mediating a costimulatory response by the T-cell, such as, but not limited to, proliferation. Costimulatory molecules are cell surface molecules other than antigen receptors or their ligands that are required for an efficient immune response. Costimulatory molecules include, but are not limited to an MHC class I molecule, BTLA and a Toll ligand receptor, as well as OX40, CD2, CD27, CD28, CDS, ICAM-1, LFA-1 (CD11a/CD18) and 4-IBB (CD137).

[0353] A costimulatory intracellular signaling domain can be the intracellular portion of a costimulatory molecule. A costimulatory molecule can be represented in the following protein families: TNF receptor proteins, Immunoglobulin-like proteins, cytokine receptors, integrins, signaling lymphocytic activation molecules (SLAM proteins), and activating NK cell receptors. Examples of such molecules include CD27, CD28, 4-1BB (CD137), OX40, GITR, CD30, CD40, ICOS, BAFFR, HVEM, lymphocyte function-associated antigen-1 (LFA-1), CD2, CD7, LIGHT, NKG2C, SLAMF7, NKp80, CD160, B7-H3, and a ligand that specifically binds with CD83, and the like.

[0354] P-CARs and immune cells comprising them have been extensively disclosed and can be prepared by the skilled person according to known methods. For example, methodologies to prepare P-CAR and cells comprising such P-CARs are disclosed in U.S. Pat. No. 7,446,190, WO2008/121420, U.S. Pat. No. 8,252,592, US20140024809, WO2012/079000, WO2014153270, WO2012/099973, WO2014/011988, WO2014/011987, WO2013/067492, WO2013/070468, WO2013/040557, WO2013/126712, WO2013/126729, WO 2013/126726, WO2013/126733, U.S. Pat. No. 8,399,645, US20130266551, US20140023674, WO2014039523, U.S. Pat. No. 7,514,537, U.S. Pat. No. 8,324,353, WO2010/025177, U.S. Pat. No. 7,446,179, WO2010/025177, WO2012/031744, WO2012/136231A1, WO2012/050374A2, WO2013074916, WO2009/091826A3, WO2013/176915 or WO/2013/059593 which are all incorporated herein in their entirety by reference. Immune cells comprising a P-CAR and a N-CAR can be prepared by the skilled person according to the methodologies disclosed in the above mentioned references. In a preferred embodiment, immune cells comprising a P-CAR and a N-CAR can be prepared by the skilled person according to the methodologies disclosed in WO2013/176915.

[0355] In some embodiments, the method of engineering T-cells of invention can comprise:

[0356] (a) modifying T-cells by inactivating at least:
[0357] A first gene expressing a target for an immunosuppressive agent, and
[0358] A second gene encoding a component of the T-cell receptor (TCR)

[0359] (b) Expanding said cells, optionally in presence of said immunosuppressive agent.

[0360] An immunosuppressive agent is an agent that suppresses immune function by one of several mechanisms of action. In other words, an immunosuppressive agent is a role played by a compound which is exhibited by a capability to diminish the extent and/or voracity of an immune response. As non-limiting example, an immunosuppressive agent can be a calcineurin inhibitor, a target of rapamycin, an interleukin-2 u-chain blocker, an inhibitor of inosine monophosphate dehydrogenase, an inhibitor of dihydrofolic acid reductase, a corticosteroid or an immunosuppressive antimetabolite.

[0361] In a particular embodiment, the genetic modification step of the method relies on the inactivation of one gene selected from the group consisting of CD52, GR, TCR alpha and TCR beta. In another embodiment, the genetic modification step of the method relies on the inactivation of two genes selected from the group consisting of CD52 and GR, CD52 and TCR alpha, CDR52 and TCR beta, GR and TCR alpha, GR and TCR beta, TCR alpha and TCR beta. In another embodiment, the genetic modification step of the method relies on the inactivation of more than two genes. The genetic modification is preferably operated ex-vivo.

[0362] In some embodiments, the method of engineering T-cells of invention can comprise

[0363] (a) Providing a T-cell, preferably from a cell culture or from a blood sample;

[0364] (b) Selecting a gene in said T-cell expressing a target for an immunosuppressive agent;

[0365] (c) Transforming said T cell with nucleic acid encoding a rare-cutting endonuclease able to selectively inactivate by DNA cleavage, preferably by double-strand break respectively: said gene encoding a target for said immunosuppressive agent, and at least one gene encoding a component of the T-cell receptor (TCR);

[0366] (d) Expressing said rare-cutting endonucleases into said T-cells;

[0367] (e) Sorting the transformed T-cells, which do not express TCR on their cell surface;

[0368] (f) Expanding said cells, optionally in presence of said immunosuppressive agent.

[0369] In some embodiment, the method to engineer cell of the invention further comprises one or more additional genomic modification step. By additional genomic modification step, can be intended the introduction into cells to engineer of one or more protein of interest. Said protein of interest can be a P-CAR and/or an N-CAR.

[0370] In some embodiment the P-CAR is a Multi-chain Chimeric Antigen Receptor particularly adapted to the production and expansion of engineered T-cells, the multi-chain CAR comprising at least two of the following components:

[0371] a) one polypeptide comprising the transmembrane domain of FcsRl alpha chain and an extracellular ligand-binding domain,

[0372] b) one polypeptide comprising a part of N- and C- terminal cytoplasmic tail and the transmembrane domain of FccRl beta chain and/or

[0373] c) two polypeptide s comprising each a part of intracytoplasmic tail and the transmembrane domain of FccRl gamma chain, whereby different polypeptides multimerize together spontaneously to form dimeric, trimeric or tetrameric CAR.

[0374] Example of tetrameric P-CARs are illustrated in FIG. 3 of WO2013176915 and different versions of multichain P-CARs are represented in FIG. 4 of WO2013176915. Such P-CAR can be expressed in a T-Cell obtained using the above disclosed method together with a N-CAR according to the present disclosure to obtain a T-cell according to the invention.

[0375] In some embodiment the invention relates to an immune cell comprising a N-CAR as defined herein and a P-CAR as defined in any of U.S. Pat. No. 7,446,190, WO2008/121420, U.S. Pat. No. 8,252,592, US20140024809, WO2012/079000, WO2014153270, WO2012/099973, WO2014/011988, WO2014/011987, WO2013/067492, WO2013/070468, WO2013/040557, WO2013/126712, WO2013/126729, WO 2013/126726, WO2013/126733, U.S. Pat. No. 8,399,645, US20130266551, US20140023674, WO2014039523, U.S. Pat. No. 7,514,537, U.S. Pat. No. 8,324,353, WO2010/025177, U.S. Pat. No. 7,446,179, WO2010/025177, WO2012/031744, WO2012/136231A1, WO2012/050374A2, WO2013074916, WO/2009/091826A3, WO2013/176915 or WO/2013/059593.

[0376] In some embodiments, the immune cell comprises an N-CAR as defined herein and a multi-chain P-CAR as defined in WO2014/039523.

[0377] In some embodiments, the immune cell of the invention is activated when the P-CAR antigen binding domain binds to its antigen. In some embodiments, such activation is reduced when the N-CAR antigen binding domain binds to its antigen. In some embodiments such reduction of activation is increased, preferably by at least 5%, 10%, 15%, 20% or 30% in an immune cell comprising an N-CAR according to the invention as compared to the same immune cell comprising an N-CAR comprising the full intracellular domain of PD-1. In some embodiments such reduction of activation is increased, preferably by at least 5%, 10%, 15%, 20% or 30% in an immune cell comprising an N-CAR according to the invention as compared to the same immune cell comprising an N-CAR comprising the full intracellular domain of CTLA-4.

[0378] In some embodiments, the activation is reduced by at least 5%, 10%, 15%, 20%, 25%, 30%, 35%, 40%, 45%, 50%, 55%, 60%, 65%, 70%, 75%, 80%, 85% when the N-CAR and P-CAR antigen binding domains both binds to their respective antigens as compared to when only the CAR antigen binding domain binds to its antigen.

[0379] In some embodiments, the level of activation of the immune cell is measured by determining cytokine production. In some embodiments, the level of activation of the immune cell is measured by monitoring IFNgamma production by ELISA and/or FACS and/or luminex assay. In some embodiments, the level of activation of the immune cell is measured by monitoring TNFalpha production by ELISA and/or luminex assay.

[0380] In some embodiments, the level of activation of the immune cell is measured by monitoring degranulation, for example by measuring CD107a levels by FACS.

[0381] In some embodiments, the level of activation of the immune cell is measured by monitoring the ability of the immune cell to kill target cells.

[0382] In some embodiments, the level of activation of the immune cell is measured by monitoring the luciferase activity in reporter cells incorporating inducible NFAT- or NfkB-regulated luciferase expression, such as for example as disclosed in Example 3 below.

[0383] In some embodiments, the negative signal of the N-CAR is short-termed and reversible to ensure that the immune cells comprising a P-CAR and an N-CAR according to the invention may be activated when it encounters only P-CAR antigen, despite prior inactivation in a off-tissue setting that has both P-CAR and N-CAR antigens.

### EXAMPLES

### Example 1

### Identification of Inhibitory Domains to be used in N-CARs

[0384] There are several receptors, i.e. CTLA-4, PD-1, BTLA, TIM-3, LAG3 that are known to provide a negative signal to attenuate or abrogate T-cell signaling. The intracellular signaling components of PD-1 were studied to identify motifs that may be responsible for its activity. PD-1 contains both an immunoreceptor tyrosine-based inhibitory motif (ITIM) and immunoreceptor tyrosine-based switch motif (ITSM) and data suggests that the ITSM domain plays a significant role in recruiting phosphatases (i.e. SHP2) that enable inactivation of upstream signaling components, like CD3zeta (see Riley J L., Immunol Rev. 2009 May; 229(1):114-25; or Yokosuka T et al., J Exp Med. 2012 Jun. 4; 209(6):1201-17). Other receptors and molecules with ITSMs were identified and analyzed to help understand the functional role of this sequence motif with the intention to utilize it in providing a negative signal that attenuates or abrogates T-cell activation caused by engagement of the P-CAR. Protein sequences were downloaded from swissprot database restricting to sequences that were annotated as being cytoplasmic. Each of these cytoplasmic sequences was searched for the patterns of interest (ITIM motif, ITSM motif or ITIM and ITSM motif).

### Example 2

### Design of N-CARs

[0385] N-CARs comprising at least one ITSM, alone or in combination with one or more ITIMs or other inhibitory domain such as those of TIM-3, LAG-3 or CTLA4 are prepared in an effort to generate effective NOT gates.

[0386] In particular, the following N-CARs are prepared:
[0387] N-CARs comprising multiple tandems PD-1 ITIM-ITSM;
[0388] N-CARs comprising multiple tandems PD-1 ITSM;
[0389] N-CARs comprising single or multiple non-PD1 natural ITSM or ITIM-ITSM;
[0390] N-CARs comprising synthetic ITSM or ITIM-ITSM;
[0391] N-CARS comprising at least one ITSM and signaling domains from other inhibitory receptors such as TIM-3, LAG-3 or CTLA4.

### Example 3

### Activity of T-Cells Comprising a P-CAR and a N-CAR in Immortalized Human T-Cells

[0392] An experimental model is used to test the N-CARs designed according to Example 2. The model consists of a positive signaling CAR (P-CAR) construct containing from the N-terminus, a signaling domain or secretory signal domain (e.g. CD8 secretory signal sequence), anti-CD-19 single-chain antibody, hinge (e.g. CD8alpha), transmembrane (e.g CD8alpha), and positive intracellular signaling domains (e.g. 41BB and CD3zeta). The P-CAR is followed by or preceded by a fluorescent marker (e.g. EGFP) or antibiotic resistance gene separated from the P-CAR by either a P2A or IRES (see for example Table 9).

[0393] This construct is constructed using standard molecular biology methods and transduced into T-cell receptor (TCR) negative or an NFAT- or NfkB-regulated luciferase reporter Jurkat cell-line. These cells are purified using bulk FACS sorting using the fluorescent marker or by selection in the appropriate antibiotic followed by flow cytometry to confirm surface CAR expression, and tested for activity against differentially expressing CD19 cell-lines to establish activation, proliferation, and cytokine release, and degranulation/cytotoxicity thresholds. Once an appropriate P-CAR cell line has been identified, these cells are transduced with a plasmid containing the negative signaling CAR (N-CAR) construct containing from the N-terminus, a signaling domain (e.g. CD8 secretory signal sequence), anti-PSMA single-chain antibody, hinge (e.g. truncated PD-1 extracellular domain), transmembrane (e.g. PD-1), and negative intracellular signaling domains to be evaluated (native or modified ITSMs optionally in combination with ITIMs or other inhibitory signaling domains) followed by or preceded by a fluorescent marker (e.g. mCherry) or antibiotic-resistance gene separated from the N-CAR by either a P2A or IRES. Multiple versions of these N-CAR constructs are constructed, using standard site-directed and cassette mutagenesis. The T-cells comprising a P-CAR and a N-CAR (also named P-CAR⁺/N-CAR⁺ T-cells or NOT GATE CAR T-Cells) are purified by bulk FACS sorting on both fluorescent markers (e.g. EGFP and mCherry) or by sequential selection in appropriate antibiotics followed by dual-color flow cytometry to detect surface expression of both CARs, and tested first for retention of P-CAR activity on CD19 expressing cells and then the potency of negative signal on cells expressing both CD19 and PSMA. The N-CAR candidates are characterized by their ability to attenuate positive signal from P-CAR on varying levels of both the P-CAR and N-CAR antigens by monitoring NFAT- or NfkB-regulated luciferase reporter activity, cytokine production (IFNgamma by ELISA/FACS), degranulation (CD107a levels) and killing of target cells (by FACS). Reversibility and the kinetics of reversibility of the N-CAR signal are tested by first incubating the P-CAR⁺/N-CAR⁺ T-cells with cells expressing both CD19 and PSMA, purifying them followed by incubation with CD19 cells.

[0394] The cytokine production and cytotoxicity of these cells are compared to cells that were directly incubated with CD19 cells.

[0395] Experiment and Results

[0396] Jurkat cells (clone E6-1 ATCC# TIB-152) were maintained at a density of 0.4-2×10⁶ cells/mL in RPMI 1640 (Life Technologies) containing 10% fetal bovine serum (hyclone), 1mM sodium pyruvate, 1×glutaMAX, lx nonessential amino acids (Mediatech), and 25mM HEPES buffer.

[0397] 293T cells (clone HEK-293T/17, ATCC CRL-11268) were maintained subconfluently in DMEM containing 4.5 g/L glucose, 10% fetal bovine serum, 1mM sodium pyruvate, 1 x glutaMAX, lx nonessential amino acids, and 25mM HEPES.

[0398] Lentiviral particles (LV) were produced by transient transfection of sub-confluent 293T cells in 6-well plates with a transfer vector (pLVX) encoding the CAR or protein of interest, an HIV- 1 gag pol packaging plasmid (psPAX2), and a VSV-G expression plasmid (pMD2.G) at a 4:3:1 ratio, using Lipofectamine 2000 (Invitrogen). The following day the media was replaced, and 48 h after transfection the LV was harvested and filtered through a 0.45 um Millex-HV syringe filter (Millipore). Fresh LV supernatant was used immediately to transduce sub- confluent Jurkat or 293T cells by diluting LV sup in an equal volume of cell culture medium.

[0399] Artificial antigen-presenting cells (AAPCs) were prepared by sequential LV transduction of 293T cells. Subconfluent 293T cells were transfected with pLVX expression constructs encoding either codon-optimized full-length human CD19 (NP_001171569), full-length human PSMA (NP_004467), or empty vector. The pLVX vectors comprised a puromycin-resistance gene followed by a P2A sequence and the target antigen. Transduced 293Ts were subsequently selected in puromycin-containing media, and maintained as pools of expressing clones. Surface antigen expression was determined by flow cytometry, using APC-conjugated goat F(ab′)₂-anti-human PSMA (clone LN1-17, BioLegend cat #342504) or BV421-conjugated mouse-anti-human CD19 (clone H1B19, BD Biosciences cat #562440). Cells were sorted by FACS into populations of CD19 low-expressing or high-expressing clones, PSMA low-expressing or high-expressing clones, and dual CD19 low/PSMA high-expressers or dual CD19 high/PSMA high-expressers.

[0400] For determination of T cell activation, a luciferase reporter assay was established in Jurkat cells. Jurkat cells were transduced to stably express a firefly luciferase gene under the control of a minimal (m)CMV promoter and tandem repeats of either the NFKB or NFAT transcriptional response element (TRE) [(Qiagen Cignal Lentivirus]. Transcription factors recognizing these TREs play important roles in T cell signal transduction pathways and are integral in the transcriptional regulation of cytokine genes and other genes critical for the immune response. Upon T cell receptor activation, luciferase reporter activity is modulated and can be measured by quantitative luminometry.

[0401] Reporter Jurkat cells (either NFAT-Luc or NFkB-Luc) were subsequently transduced to stably express different combinations of P- and N-CARs. pLVX-CAR encoding constructs comprised an antibiotic resistance gene (puromycin resistance for P-CARS and blasticidin resistance for N-CARs) followed by a P2A sequence and the P- or N-CAR.

[0402] In particular, N-FAT-Luc and NFkB-Luc Jurkat cells expressing P-CAR1 or P-CAR2 and an N-CAR comprising an intracellular domain selected from the sequences listed in Table 10 were prepared.

[0403] P-CAR1 comprises a ScFv from anti-CD19 antibody FMC63 (see Nicholson et al, (1997), Mol. Immunol. 34: 1157-1165), a CD8 alpha hinge and transmembrane domain, and an intracellular domain comprising a 4-1BB and CD3zeta intracellular signaling domains.

[0404] P-CAR2 comprises a ScFv from anti-CD19 antibody SJ25C1 (see US2013063097), a CD28 hinge and transmembrane domain, and an intracellular domain comprising a CD28 and CD3zeta intracellular signaling domains.

[0405] The specific sequences of P-CAR1 and P-CAR2 are listed in Table 9.

TABLE 9

| | |
|---|---|
| P-CAR1 | MALPVTALLLPLALLLHAARPDIQMTQTTSSLSASLGDRVTISCRASQDISKYLN |
| (SEQ ID | WYQQKPDGTVKLLIYHTSRLHSGVPSRFSGSGSGTDYSLTISNLEQEDIATYFC |
| No 2019) | QQGNTLPYTFGGGTKLEITGGGGSGGGGSGGGGSEVKLQESGPGLVAPSQS |
| | LSVTCTVSGVSLPDYGVSWIRQPPRKGLEWLGVIWGSETTYYNSALKSRLTIIK |
| | DNSKSQVFLKMNSLQTDDTAIYYCAKHYYYGGSYAMDYWGQGTSVTVSSTTT |
| | PAPRPPTPAPTIASQPLSLRPEACRPAAGGAVHTRGLDFACDIYIWAPLAGTC |
| | GVLLLSLVITLYCKRGRKKLLYIFKQPFMRPVQTTQEEDGCSCRFPEEEEGGC |
| | ELRVKFSRSADAPAYKQGQNQLYNELNLGRREEYDVLDKRRGRDPEMGGKP |
| | RRKNPQEGLYNELQKDKMAEAYSEIGMKGERRRGKGHDGLYQGLSTATKDT |
| | YDALHMQALPPR |
| P-CAR2 | MALPVTALLLPLALLLHAEVKLQQSGAELVRPGSSVKISCKASGYAFSSYWMN |
| (SEQ ID | VVVKQRPGQGLEWIGQIYPGDGDTNYNGKFKGQATLTADKSSSTAYMQLSGL |
| No 2020) | TSEDSAVYFCARKTISSVVDFYFDYWGQGTTVTVSSGGGGSGGGGSGGGGS |
| | DIELTQSPKFMSTSVGDRVSVTCKASQNVGTNVAWYQQKPGQSPKPLIYSAT |
| | YRNSGVPDRFTGSGSGTDFTLTITNVQSKDLADYFCQQYNRYPYTSGGGTKL |
| | EIKRAAAIEVMYPPPYLDNEKSNGTIIHVKGKHLCPSPLFPGPSKPFWVLVVVG |
| | GVLACYSLLVTVAFIIFWVRSKRSRLLHSDYMNMTPRRPGPTRKHYQPYAPPR |
| | DFAAYRSRVKFSRSADAPAYQQGQNQLYNELNLGRREEYDVLDKRRGRDPE |
| | MGGKPRRKNPQEGLYNELQKDKMAEAYSEIGMKGERRRGKGHDGLYQGLST |
| | ATKDTYDALHMQALPPR |

[0406] The tested N-CARs comprise an amino acid sequence of SEQ ID No 1999 (ScFv from the anti-PSMA antibody J591 (see WO2004/098535), PD1 hinge and transmembrane domain) and an intracellular domain selected from the sequences listed in Table 10. A CAR comprising only SEQ ID No 1999 (no inhibitory intracellular domain) was used as control (APD1).

TABLE 10

| N-CAR NAME | Intracelullar domain |
|---|---|
| PD1 | CSRAARGTIGARRTGQPLKEDPSAVPVFSVDYGELDFQWREKTPEPPVPC |
| | VPEQTEYATIVFPSGMGTSSPARRGSADGPRSAQPLRPEDGHCSWPL |
| | (SEQ ID No 2000) |
| BTLA | RRHQGKQNELSDTAGREINLVDAHLKSEQTEASTRQNSQVLLSETGIYDND |
| | PDLCFRMQEGSEVYSNPCLEENKPGIVYASLNHSVIGPNSRLARNVKEAPT |
| | EYASICVRS (SEQ ID No 2001) |
| CD244 | WRRKRKEKQSETSPKEFLTIYEDVKDLKTRRNHEQEQTFPGGGSTIYSMIQ |
| | SQSSAPTSQEPAYTLYSLIQPSRKSGSRKRNHSPSFNSTIYEVIGKSQPKAQ |
| | NPARLSRKELENFDVYS (SEQ ID No 2002) |
| PD1-CTLA4 | CSRAARGTIGARRTGQPLKEDPSAVPVFSVDYGELDFQWREKTPEPPVPC |
| | VPEQTEYATIVFPSGMGTSSPARRGSADGPRSAQPLRPEDGHCSWPLAVS |
| | LSKMLKKRSPLTTGVYVKMPPTEPECEKQFQPYFIPIN (SEQ ID No 2003) |
| PD1-LAG3 | CSRAARGTIGARRTGQPLKEDPSAVPVFSVDYGELDFQWREKTPEPPVPC |
| | VPEQTEYATIVFPSGMGTSSPARRGSADGPRSAQPLRPEDGHCSWPLHL |
| | WRRQWRPRRFSALEQGIHPPQAQSKIEELEQEPEPEPEPEPEPEPEPEPE |
| | QL (SEQ ID No 2004) |
| PD1-PD1 | CSRAARGTIGARRTGQPLKEDPSAVPVFSVDYGELDFQWREKTPEPPVPC |
| | VPEQTEYATIVFPSGMGTSSPARRGSADGPRSAQPLRPEDGHCSWPLCS |
| | RAARGTIGARRTGQPLKEDPSAVPVFSVDYGELDFQWREKTPEPPVPCVP |
| | EQTEYATIVFPSGMGTSSPARRGSADGPRSAQPLRPEDGHCSWPL (SEQ |
| | ID No 2005) |
| PD1-TIM3 | CSRAARGTIGARRTGQPLKEDPSAVPVFSVDYGELDFQWREKTPEPPVPC |
| | VPEQTEYATIVFPSGMGTSSPARRGSADGPRSAQPLRPEDGHCSWPLFK |
| | WYSHSKEKIQNLSLISLANLPPSGLANAVAEGIRSEENIYTIEENVYEVEEPN |
| | EYYCYVSSRQQPSQPLGCRFAMP (SEQ ID No 2006) |
| CD300LF | WRMMKYQQKAAGMSPEQVLQPLEGDLCYADLTLQLAGTSPQKATTKLSS |
| | AQVDQVEVEYVTMASLPKEDISYASLTLGAEDQEPTYCNMGHLSSHLPGR |
| | GPEEPTEYSTISRP (SEQ ID No 2007) |
| LY9 | KRKGRCSVPAFCSSQAEAPADTPEPTAGHTLYSVLSQGYEKLDTPLRPAR |
| | QQPTPTSDSSSDSNLTTEEDEDRPEVHKPISGRYEVFDQVTQEGAGHDPA |
| | PEGQADYDPVTPYVTEVESVVGENTMYAQVFNLQGKTPVSQKEESSATIY |
| | CSIRKPQVVPPPQQNDLEIPESPTYENFT (SEQ ID No 2008) |
| PECAM | KCYFLRKAKAKQMPVEMSRPAVPLLNSNNEKMSDPNMEANSHYGHNDDV |
| | RNHAMKPINDNKEPLNSDVQYTEVQVSSAESHKDLGKKDTETVYSEVRKA |
| | VPDAVESRYSRTEGSLDGT (SEQ ID No 2009) |
| SIGLEC9 | VRSCRKKSARPAAGVGDTGIEDANAVRGSASQGPLTEPWAEDSPPDQPP |
| | PASARSSVGEGELQYASLSFQMVKPWDSRGQEATDTEYSEIKIHR (SEQ |
| | ID No 2010) |
| SIRPA | RIRQKKAQGSTSSTRLHEPEKNAREITQDTNDITYADLNLPKGKKPAPQAAE |
| | PNNHTEYASIQTSPQPASEDTLTYADLDMVHLNRTPKQPAPKPEPSFSEYA |
| | SVQVPRK (SEQ ID No 2011) |
| PD1-L2-ITSM | CSRAARGTIGARRTGQPLKEDPSAVPVFSVDYGELDFQWREKTPEPPVPC |
| | VPEQTEYATIDFQWREKTPEPPVPCVPEQTEYATIVFPSGMGTSSPARRGS |
| | ADGPRSAQPLRPEDGHCSWPL (SEQ ID No 2012) |
| PD1-L2-ITSM- | CSRAARGTIGARRTGQPLKEDPSAVPVFSVDYGELDFQWREKTPEPPVPC |
| L2-ITSM | VPEQTEYATIDFQWREKTPEPPVPCVPEQTEYATIDFQWREKTPEPPVPCV |
| | PEQTEYATIVFPSGMGTSSPARRGSADGPRSAQPLRPEDGHCSWPL (SEQ |
| | ID No 2013) |
| PD1 (ITSM mut | CSRAARGTIGARRTGQPLKEDPSAVPVFSVDYGELDFQWREKTPEPPVPC |
| 1) | VPEQTEYSEIVFPSGMGTSSPARRGSADGPRSAQPLRPEDGHCSWPL |
| | (SEQ ID No 2014) |
| PD1 (ITSM mut | CSRAARGTIGARRTGQPLKEDPSAVPVFSVDYGELDFQWREKTPEPPVPC |
| 2) | VPEQTEYSEVVFPSGMGTSSPARRGSADGPRSAQPLRPEDGHCSWPL |
| | (SEQ ID No 2015) |
| PD1 (ITSM | CSRAARGTIGARRTGQPLKEDPSAVPVFSVDYGELDFQWREKTPEPPVPC |
| mut3) | VPEQTEYASIVFPSGMGTSSPARRGSADGPRSAQPLRPEDGHCSWPL |
| | (SEQ ID No 2016) |
| PD1-KIR2DL2 | CSRAARGTIGARRTGQPLKEDPSAVPVFSVDYGELDFQWREKTPEPPVPC |
| | VPEQTEYATIVFPSGMGTSSPARRGSADGPRSAQPLRPEDGHCSWPLHR |
| | WCSNKKNAAVMDQESAGNRTANSEDSDEQDPQEVTYTQLNHCVFTQRKI |
| | TRPSQRPKTPPTDIIVYAELPNAESRSKVVSCP (SEQ ID No 2017) |

[0407] Three days after transduction, Jurkat cells were placed into antibiotic selection media to select for pools of stable CAR-expressing clones.

[0408] Dual cell surface expression of P-CAR1 (Table 9) and N-CARs listed in Table 10 assessed by multicolor flow cytometry in transduced NFAT-luciferase reporter Jurkat cells is shown in FIGS. 1 and 2. Dual cell surface expression of P-CAR1 (Table 9) and N-CARs listed in Table 10 assessed by multicolor flow cytometry in transduced NFkB-luciferase reporter Jurkat cells is shown in FIGS. 3 and 4. Dual cell surface expression of P-CAR2 (Table 9) and N-CARs listed in Table 10 assessed by multicolor flow cytometry in transduced NFAT-luciferase reporter Jurkat cells is shown in FIGS. 6 and 7. Dual cell surface expression of P-CAR2 and N-CARs listed in Table 10 assessed by multicolor flow cytometry in transduced NFkB-luciferase reporter Jurkat cells is shown in FIGS. 8 and 9.

[0409] Cells were sequentially transduced with P-CAR and N-CAR lentivirus, and selected for antibiotic-resistant clones after each transduction. Intracellular domains of the various N-CARs are shown above each dot plot. P-CAR expression was detected using a recombinant human CD19-mouse IgG Fc fusion protein followed by APC-conjugated F(ab′)2 goat anti-mouse Fcy (shown on x axis), and N-CAR expression was detected with a biotinylated recombinant human PSMA-human IgG1 Fc fusion protein followed by PE-conjugated streptavidin (y axis).

[0410] In Vitro T Cell Activation Assay

[0411] For coculture assays, effector Jurkat cells expressing different combinations of P- and N-CARs were cocultured with AAPCs expressing either CD19 (on-target), both CD19 and PSMA (off-target), or neither antigen (empty vector transduced). AAPC target cells were plated at a density of 20,000 cells per well in tissue culture-treated flat-bottom white 96-well plates (Corning COSTAR). Plates were incubated at 37° C. in 5% CO₂ for 24 hours, after which time media was removed and 100,000 Control ΔPD1- or test N-CAR-transduced luciferase reporter Jurkat cells expressing P-CAR1 or P-CAR2 were added to each well in a volume of 100 uL. After a 16-hour incubation at 37° C., 100 uL Bright-Glo luciferase substrate (Promega) was added per well, plates were shaken for 2 minutes, and relative luciferase units (RLU) quantified on a Perkin Elmer EnVision Multilabel Reader. Each Jurkat cell line was tested in sextuplicate and results presented as a ratio of the mean RLU value from coculture with off-target AAPCs to the mean RLU from coculture with target AAPCs.

[0412] FIGS. 5A, 5B and 5C show the inhibitory effect of various N-CARs on P-CAR1 induced T cell activation. Control ΔPD1- or test N-CAR-transduced luciferase reporter Jurkat cells expressing P-CAR1 were incubated with either CD19-expressing AAPCs or dual CD19+PSMA-expressing AAPCs, and luciferase activity was assessed 16h later. Data are expressed as a ratio of the mean RLU from co-culture with CD19+PSMA AAPCs/CD19 AAPCs. n=6 replicates per sample; data shown are the means±SEM. FIGS. 5A/5C and 5B show results using NFAT-luciferase reporter and NFkB-luciferase reporter Jurkat cells, respectively.

[0413] FIGS. 10A and 10B show the inhibitory effect of various N-CARs on P-CAR2 induced T cell activation. Control ΔPD1- or test N-CAR-transduced luciferase reporter Jurkat cells expressing P-CAR2 were incubated with either CD19-expressing or dual PSMA/CD19-expressing AAPCs, and luciferase activity was assessed 16h later. Data are expressed as a ratio of the mean RLU from co-culture with CD19+PSMA AAPCs/CD19 AAPCs. n=6 replicates per sample; data shown are the means±SEM. Figures. 10A and 10B show results using NFAT-luciferase reporter and NFkB-luciferase reporter Jurkat cells, respectively.

### Example 4

### Activity of P-CAR⁺/N-CAR⁺ T-Cells in Primary Human T-Cells

[0414] The N-CAR designed according to example 2 are also optionally tested in primary human T-cells to ensure that the results from example 3 obtained with Jurkat T-cells translate to primary cells. This can be done by first transducing N-CAR constructs into primary human T-cells obtained according to methods known to the skilled person and monitoring the attenuation of T-cell activation by anti-CD3/CD28 stimulation in the absence and presence of N-CAR antigen. In addition, the P-CAR and N-CAR constructs disclosed in example 3 can also be transduced into primary human T-cells and tested on CD19, PSMA, and CD19/PSMA cells.

### Example 5

### Activity of T-Cells Comprising P-CAR and N-CAR in Xenograft Studies

[0415] P-CAR and N-CAR constructs as disclosed in Example 3 can be transduced into primary human T-cells and tested for efficacy in xenograft studies in NSG animals transplanted with tumors expressing, either only CD19 or both CD19 and PSMA. NSG mice are transplanted with luciferase labeled 10⁵-10⁶ cells expressing either CD19 or CD19 and PSMA. A few days after engraftment, these animals are infused with 10⁴-10⁶ P-CAR⁺/N-CAR⁺ T-cells intravenously. The animals are dosed with luciferin prior to imaging on the IVIS imaging system routinely to monitor tumor load.

[0416] The invention is further illustrated by the following embodiments:

[0417] 1. An inhibitory chimeric antigen receptor (N-CAR) comprising

[0418] an extracellular domain comprising an antigen binding domain,

[0419] a transmembrane domain,

[0420] an intracellular domain, and,

[0421] wherein the intracellular domain comprises an Immunoreceptor Tyrosine-based Switch Motif ITSM, wherein said ITSM is a sequence of amino acid TX₁₁YX₂X₃X₄, wherein

[0422] X₁ is an amino acid

[0423] X₂ is an amino acid

[0424] X₃ is an amino acid and

[0425] X₄ is V or I.

[0426] 2. The N-CAR according to embodiment 1, wherein when the extracellular domain is a scFv against PSMA, then the intracellular domain is not the intracellular domain of human PD-1.

[0427] 3. The N-CAR according to embodiment 1 or 2, wherein the extracellular domain does not bind to PMSA.

[0428] 4. The N-CAR according to any one of embodiments 1 to 3, wherein the intracellular domain does not comprise the full intracellular domain of PD-1.

[0429] 5. The N-CAR according to any one of embodiments 1 to 4, wherein ITSM motif is not TEYATI.

[0430] 5.1 The N-CAR according to any one of embodiments 1 to 5, wherein the intracellular domain is not the intracellular domain of human PD1.

[0431] 5.2 The N-CAR according to any one of embodiments 1 to 5, wherein the intracellular domain is not the intracellular domain of human BTLA.

[0432] 5.3 The N-CAR according to any one of embodiments 1 to 5, wherein the intracellular domain is not the intracellular domain of human CD244.

[0433] 5.4 The N-CAR according to any one of embodiments 1 to 5, wherein the intracellular domain is not SEQ ID No 2000, SEQ ID No 2001 or SEQ ID No 2002.

[0434] 6. The N-CAR according to any one of embodiments 1 to 5.4, wherein the intracellular domain comprises the sequence ((1_{1—}1-ITIM-L2)ⁿ-(L3-ITSM-L4)^{m})^{p} , wherein

[0435] n is 0, 1 or an integer greater than 1;

[0436] m is 1 or an integer greater than 1;

[0437] p is 1 or an integer greater than 1;

[0438] L1 is absent or comprises one or more, preferably one, sequences selected from the group consisting of:
[0439] (a) a naturally occurring N-terminal flanking region of an ITIM only intracellular domains or a fragment thereof;
[0440] (b) a naturally occurring N-terminal flanking region of an ITIM.*ITSM intracellular domains or a fragment thereof;
[0441] (c) a naturally occurring intracellular domain from a known inhibitory receptor, wherein the said intracellular domain is N-terminally flanking to a sequence in (c) above, or a fragment thereof; and,
[0442] (d) a non-naturally occurring sequence comprising between 1 and 500 amino acids;

[0443] each of L2 and L3 is absent or comprises one or more, preferably one, sequences selected from the group consisting of:
[0444] (e) a naturally occurring C-terminal flanking region of an ITIM only intracellular domain or a fragment thereof;
[0445] (f) a naturally occurring N-terminal flanking region of an ITSM only intracellular domain or a fragment thereof;
[0446] (g) a naturally occurring intracellular domain between ITIM and ITSM from proteins that have ITIM.*ITSM motif or a fragment thereof;
[0447] (h) a naturally occurring intracellular domain from a known inhibitory receptor wherein the said intracellular domain is N-terminally flanking to a sequence in (0 or (g) above, or a fragment thereof; and
[0448] (i) a non-naturally occurring sequence comprising between 1 and 500 amino acids; and

[0449] L4 is absent or comprises one or more, preferably one, sequences selected from the group consisting of:
[0450] (j) a naturally occurring C-terminal flanking region of an ITIM.*ITSM intracellular domain or a fragment thereof;
[0451] (k) a naturally occurring C-terminal flanking region of an ITSM only intracellular domain or a fragment thereof;
[0452] (l) a naturally occurring intracellular domain from a known inhibitory receptor wherein the said intracellular domain is C-terminally flanking to a sequence in (j) or (k) above; or a fragment thereof and
[0453] (m) a non-naturally occurring sequence comprising between 1 and 500 amino acids,

[0454] the ITIM is the sequence X₅X₆YX₇X₈X₉, wherein

[0455] X₅ is S, V, I or L,

[0456] X₆ is an amino acid,

[0457] X₇ is an amino acid,

[0458] X₈ is an amino acid, and,

[0459] X₉ is V, I or L, and

[0460] the ITSM is the sequence TX₁₁YX₂X₃X₄, wherein

[0461] X₁ is an amino acid,

[0462] X₂ is an amino acid,

[0463] X₃ is an amino acid, and,

[0464] X₄ is V or I,

[0465] or a variant thereof.

[0466] 7. The N-CAR according to embodiment 6, wherein

[0467] L1 is absent or comprises one or more, preferably one, sequences selected from the group consisting of:
[0468] (a) a naturally occurring N-terminal flanking region of ITIM only intracellular domains selected from the sequences shown in Table 3 or a fragment thereof;
[0469] (b) a naturally occurring N-terminal flanking region of ITIM.*ITSM intracellular selected from the sequences shown in Table 1 or a fragment thereof;
[0470] (c) a naturally occurring intracellular domain from a known inhibitory receptor selected from the sequences shown in Table 2 or a fragment thereof, wherein said intracellular domain is N-terminally flanking to a sequence in (b) above, or a fragment thereof; and
[0471] (d) a non-naturally occurring sequence comprising between 1 and 500 amino acids;

[0472] each of L2 and L3 is absent or comprises one or more, preferably one, sequences selected from the group consisting of:
[0473] (e) a naturally occurring C-terminal flanking region of ITIM only intracellular domains selected from the sequences shown in Table 4 or a fragment thereof;
[0474] (f) a naturally occurring N-terminal flanking region of ITSM only intracellular domains selected from the sequences shown in Table 6, or a fragment thereof;
[0475] (g) a naturally occurring intracellular domain between ITIM and ITSM from proteins that have ITIM.*ITSM motif selected from the sequences shown in Table 5, or a fragment thereof;
[0476] (h) a naturally occurring intracellular domain from a known inhibitory receptor selected from the sequences shown in Table 2 or a fragment thereof wherein said intracellular domain is N-terminally flanking to a sequence in (f) or (g) above, or a fragment thereof; and
[0477] (i) a non-naturally occurring sequence comprising between 1 and 500 amino acids; and

[0478] L4 is absent or comprises one or more, preferably one, sequences selected from the group consisting of:
[0479] (j) a naturally occurring C-terminal flanking region of ITIM.*ITSM intracellular domains selected from the sequences shown in Table 7, or a fragment thereof;
[0480] (k) a naturally occurring C-terminal flanking region of ITSM only intracellular domains selected from the sequences shown in Table 8, or a fragment thereof;
[0481] (l) a naturally occurring intracellular domain from a known inhibitory receptor selected from the sequences shown in Table 2 or a fragment thereof wherein said intracellular domain is C-terminally flanking to a sequence in (I) above, or a fragment thereof; and,
[0482] (m) a non-naturally occurring sequence comprising between 1 and 500 amino acids.

[0483] 8. The N-CAR according to embodiment 6 or 7 wherein the intracellular domain comprises the sequence (L1-ITIM-L2-L3-ITSM-L4)^{p} wherein

[0484] p is 1, 2, 3, 4 or 5;

[0485] L1 is a naturally occurring N-terminal flanking region of an ITIM only intracellular domain or a fragment thereof such as, for example, any of the sequences shown in Table 3 or a fragment thereof;

[0486] L2 is absent;

[0487] L3 is a naturally occurring a naturally occurring intracellular domain between ITIM and ITSM from proteins that have ITIM.*ITSM motif or a fragment thereof such as, for example, any of the sequences shown in Table 5 or a fragment thereof;

[0488] L4 is a naturally occurring C-terminal flanking region of an ITIM.*ITSM intracellular domain or a fragment thereof such as, for example, any of the sequences shown in Table 7 or a fragment thereof; or a naturally occurring C-terminal flanking region of an ITSM only intracellular domain such as, for example, any of the sequences shown in Table 8 or a fragment thereof.

[0489] 9. The N-CAR according to any one of embodiments 6 to 8 wherein L1 is absent or comprises one or more, preferably one, sequences or selected from the group consisting of:
[0490] (a) a naturally occurring N-terminal flanking region of ITIM only intracellular domains selected from

YKMYGSEMLHKRDPLDEDEDTD
DHWALTQRTARAVSPQSTKPMAES
CSRAARGTIGARRTGQPLKEDPSAVPVFS
HRQNQIKQGPPRSKDEEQKPQQRPDLAVDVLERTADKATVNGLPEKDRET
DTSALAAGSSQE
KTHRRKAARTAVGRNDTHPTTGSASPKHQKKSKLHGPTETSSCSGAAPTV
EMDEE
LTRKKKALRIHSVEGDLRRKSAGQEEWSPSAPSPPGSCVQAEAAPAGLCG
EQRGEDCAELHDYFNV
KCYFLRKAKAKQMPVEMSRPAVPLLNSNNEKMSDPNMEANSHYGHNDDVR
NHAMKPINDNKEPLNSD
RRHQGKQNELSDTAGREINLVDAHLKSEQTEASTRQNSQVLLSETGIYDN
DPDLCFRMQEGSEVYSNPCLEENKPG
WRMMKYQQKAAGMSPEQVLQPLEGDLCYADLTLQLAGTSPQKATTKLSSA
QVDQVEVEYVTMASLPKED
KRVQETKFGNAFTEEDSELVVNYIAKKSFCRRAIELTLHSLGVSEELQNK
LEDVVIDRNLLILGKILGEGEFGSVMEGNLKQEDGTSLKVAVKTMKLDNS
SQREIEEFLSEAACMKDFSHPNVIRLLGVCIEMSSQGIPKPMVILPFMKY
GDLHTY

[0491] (b) a naturally occurring N-terminal flanking region of ITIM.*ITSM intracellular domains selected from

YKMYGSEMLHKRDPLDEDEDTD
WRMMKYQQKAAGMSPEQVLQPLEGD
CSRAARGTIGARRTGQPLKEDPSAVPVFS
RIRQKKAQGSTSSTRLHEPEKNAREITQDTND
KTHRRKAARTAVGRNDTHPTTGSASPKHQKKSKLHGPTETSSCSGAAPTV
EMDEE
KCYFLRKAKAKQMPVEMSRPAVPLLNSNNEKMSDPNMEANSHYGHNDDVR
NHAMKPINDNKEPLNSD
RRHQGKQNELSDTAGREINLVDAHLKSEQTEASTRQNSQVLLSETGIYDN
DPDLCFRMQEGSEVYSNPCLEENKPG
KRVQETKFGNAFTEEDSELVVNYIAKKSFCRRAIELTLHSLGVSEELQNK
LEDVVIDRNLLILGKILGEGEFGSVMEGNLKQEDGTSLKVAVKTMKLDNS
SQREIEEFLSEAACMKDFSHPNVIRLLGVCIEMSSQGIPKPMVILPFMKY
GDLHTY

[0492] (c) a naturally occurring intracellular domain from a known inhibitory receptor selected from the sequences shown in table 2, wherein said intracellular domain is N-terminally flanking to a sequence in (b) above; and
[0493] (d) a non-naturally occurring sequence comprising between 1 and 500 amino acids.

[0494] 10. A N-CAR according to any one of embodiments 6 to 9 wherein each of L2 and L3 is absent or comprises one or more, preferably one, sequences selected from the group consisting of:
[0495] (e) a naturally occurring C-terminal flanking region of ITIM only intracellular domains selected from;

GNCSFFTETG
NFHGMNPSKDTSTEYSEVRTQ
KEEEMADTSYGTVKAENIIMMETAQTSL
NHSVIGPNSRLARNVKEAPTEYASICVRS
DHWALTQRTARAVSPQSTKPMAESITYAAVARH
QVSSAESHKDLGKKDTETVYSEVRKAVPDAVESRYSRTEGSLDGT
DFQWREKTPEPPVPCVPEQTEYATIVFPSGMGTSSPARRGSADGPRSAQP
LRPEDGHCSWPL
NLPKGKKPAPQAAEPNNHTEYASIQTSPQPASEDTLTYADLDMVHLNRTP
KQPAPKPEPSFSEYASVQVPRK
TLQLAGTSPQKATTKLSSAQVDQVEVEYVTMASLPKEDISYASLTLGAED
QEPTYCNMGHLSSHLPGRGPEEPTEYSTISRP
ETGPKHIPLQTLLKFMVDIALGMEYLSNRNFLHRDLAARNCMLRDDMTVC
VADFGLSKKIYSGDYYRQGRIAKMPVKWIAIESLADRVYTSKSDVWAFGV
TMWEIATRGMTPYPGVQNHEMYDYLLHGHRLKQPEDCLDELYEIMYSCWR
TDPLDRPTFSVLRLQLEKLLESLPDVRNQADVIYVNTQLLESSEGLAQGS
TLAPLDLNIDPDSIIASCTPRAAISVVTAEVHDSKPHEGRYILNGGSEEW
EDLTSAPSAAVTAEKNSVLPGERLVRNGVSWSHSSMLPLGSSLPDELLFA
DDSSEGSEVLM

[0496] (f) a naturally occurring N-terminal flanking region of ITSM only intracellular domains selected from;

YKMYGSEMLHKRDPLDEDEDTDISYKKLKEEEMAD
CSRAARGTIGARRTGQPLKEDPSAVPVFSVDYGELDFQWREKTPEPPVPC
VPEQ
RIRQKKAQGSTSSTRLHEPEKNAREITQDTNDITYADLNLPKGKKPAPQA
AEPNNH
KTHRRKAARTAVGRNDTHPTTGSASPKHQKKSKLHGPTETSSCSGAAPTV
EMDEELHYASLNFHGMNPSKDTS
KCYFLRKAKAKQMPVEMSRPAVPLLNSNNEKMSDPNMEANSHYGHNDDVR
NHAMKPINDNKEPLNSDVQYTEVQVSSAESHKDLGKKDTE
RRHQGKQNELSDTAGREINLVDAHLKSEQTEASTRQNSQVLLSETGIYDN
DPDLCFRMQEGSEVYSNPCLEENKPGIVYASLNHSVIGPNSRLARNVKEA
P
WRMMKYQQKAAGMSPEQVLQPLEGDLCYADLTLQLAGTSPQKATTKLSSA
QVDQVEVEYVTMASLPKEDISYASLTLGAEDQEPTYCNMGHLSSHLPGRG
PEEP
WRRKRKEKQSETSPKEFLTIYEDVKDLKTRRNHEQEQTFPGGGSTIYSMI
QSQSSAPTSQEPAYTLYSLIQPSRKSGSRKRNHSPSFNS
VRSCRKKSARPAAGVGDTGIEDANAVRGSASQGPLTEPWAEDSPPDQPPP
ASARSSVGEGELQYASLSFQMVKPWDSRGQEATD
NKCGRRNKFGINRPAVLAPEDGLAMSLHFMTLGGSSLSPTEGKGSGLQGH
IIENPQYFSDACVHHIKRRDIVLKWELGEGAFGKVFLAECHNLLPEQDKM
LVAVKALKEASESARQDFQREAELLTMLQHQHIVRFFGVCTEGRPLLMVF
EYMRHGDLNRFLRSHGPDAKLLAGGEDVAPGPLGLGQLLAVASQVAAGMV
YLAGLHFVHRDLATRNCLVGQGLVVKIGDFGMSRDIYS
KLARHSKFGMKGPASVISNDDDSASPLHHISNGSNTPSSSEGGPDAVIIG
MTKIPVIENPQYFGITNSQLKPDTFVQHIKRHNIVLKRELGEGAFGKVFL
AECYNLCPEQDKILVAVKTLKDASDNARKDFHREAELLTNLQHEHIVKFY
GVCVEGDPLIMVFEYMKHGDLNKFLRAHGPDAVLMAEGNPPTELTQSQML
HIAQQIAAGMVYLASQHFVHRDLATRNCLVGENLLVKIGDFGMSRDVYS
KRKGRCSVPAFCSSQAEAPADTPEPTAGHTLYSVLSQGYEKLDTPLRPAR
QQPTPTSDSSSDSNLTTEEDEDRPEVHKPISGRYEVFDQVTQEGAGHDPA
PEGQADYDPVTPYVTEVESVVGENTMYAQVFNLQGKTPVSQKEESSA
KRVQETKFGNAFTEEDSELVVNYIAKKSFCRRAIELTLHSLGVSEELQNK
LEDVVIDRNLLILGKILGEGEFGSVMEGNLKQEDGTSLKVAVKTMKLDNS
SQREIEEFLSEAACMKDFSHPNVIRLLGVCIEMSSQGIPKPMVILPFMKY
GDLHTYLLYSRLETGPKHIPLQTLLKFMVDIALGMEYLSNRNFLHRDLAA
RNCMLRDDMTVCVADFGLSKKIYSGDYYRQGRIAKMPVKWIAIESLADRV
YTSKSDVWAFGVTMWEIATRGM

[0497] (g) a naturally occurring intracellular domain between ITIM and ITSM from proteins that have ITIM.*ITSM motif selected from;

KEEEMAD
NFHGMNPSKDTS
QVSSAESHKDLGKKDTE
NLPKGKKPAPQAAEPNNH
NHSVIGPNSRLARNVKEAP
DFQWREKTPEPPVPCVPEQ
TLQLAGTSPQKATTKLSSAQVDQVEVEYVTMASLPKEDISYASLTLGAED
QEPTYCNMGHLSSHLPGRGPEEP
ETGPKHIPLQTLLKFMVDIALGMEYLSNRNFLHRDLAARNCMLRDDMTVC
VADFGLSKKIYSGDYYRQGRIAKMPVKWIAIESLADRVYTSKSDVWAFGV
TMWEIATRGM

[0498] (h) a naturally occurring intracellular domain from known inhibitory receptors selected from the sequences shown in table 2 wherein said intracellular domain is N-terminally flanking to a sequence in (f) or (g) above; and
[0499] (i) a non-naturally occurring sequence comprising between 1 and 500 amino acids; and

[0500] 11. The N-CAR according to according to any one of embodiments 6 to 10 wherein L4 is absent or comprises one or more, preferably one, sequences selected from the group consisting of:
[0501] (j) a naturally occurring C-terminal flanking region of ITIM.*ITSM intracellular domains selected from:

SRP
RTQ
CVRS
KAENIIMMETAQTSL
RKAVPDAVESRYSRTEGSLDGT
VFPSGMGTSSPARRGSADGPRSAQPLRPEDGHCSWPL
QTSPQPASEDTLTYADLDMVHLNRTPKQPAPKPEPSFSEYASVQVPRK
QNHEMYDYLLHGHRLKQPEDCLDELYEIMYSCWRTDPLDRPTFSVLRLQL
EKLLESLPDVRNQADVIYVNTQLLESSEGLAQGSTLAPLDLNIDPDSIIA
SCTPRAAISVVTAEVHDSKPHEGRYILNGGSEEWEDLTSAPSAAVTAEKN
SVLPGERLVRNGVSWSHSSMLPLGSSLPDELLFADDSSEGSEVLM

[0502] (k) a naturally occurring C-terminal flanking region of ITSM only intracellular domain selected from:

RTQ
SRP
KIHR
CVRS
KAENIIMMETAQTSL
RKAVPDAVESRYSRTEGSLDGT
RKPQVVPPPQQNDLEIPESPTYENFT
GKSQPKAQNPARLSRKELENFDVYS
VFPSGMGTSSPARRGSADGPRSAQPLRPEDGHCSWPL
QTSPQPASEDTLTYADLDMVHLNRTPKQPAPKPEPSFSEYASVQVPRK
FNLQGKTPVSQKEESSATIYCSIRKPQVVPPPQQNDLEIPESPTYENFT
GGRTMLPIRWMPPESILYRKFTTESDVWSFGVVLWEIFTYGKQPWYQLSN
TEAIDCITQGRELERPRACPPEVYAIMRGCWQREPQQRHSIKDVHARLQA
LAQAPPVYLDVLG
GGHTMLPIRWMPPESIMYRKFTTESDVWSLGVVLWEIFTYGKQPWYQLSN
NEVIECITQGRVLQRPRTCPQEVYELMLGCWQREPHMRKNIKGIHTLLQN
LAKASPVYLDILG
QNHEMYDYLLHGHRLKQPEDCLDELYEIMYSCWRTDPLDRPTFSVLRLQL
EKLLESLPDVRNQADVIYVNTQLLESSEGLAQGSTLAPLDLNIDPDSIIA
SCTPRAAISVVTAEVHDSKPHEGRYILNGGSEEWEDLTSAPSAAVTAEKN
SVLPGERLVRNGVSWSHSSMLPLGSSLPDELLFADDSSEGSEVLM
KDLKTRRNHEQEQTFPGGGSTIYSMIQSQSSAPTSQEPAYTLYSLIQPSR
KSGSRKRNHSPSFNSTIYEVIGKSQPKAQNPARLSRKELENFDVYS

[0503] (l) a naturally occurring intracellular domain from a known inhibitory receptor selected from the sequences shown in table 2 wherein said intracellular domain is C-terminally flanking to a sequence in (j) or (k) above; and
[0504] (m) a non-naturally occurring sequence comprising between 1 and 500 amino acids.

[0505] 11.1. The N-CAR according to embodiment 6 wherein the intracellular domain comprises the following sequence:

[0506] ((L1-ITIM-L2)ⁿ-(L3-ITSM-L4)^{m})^{p} , wherein

[0507] n is 0;

[0508] m is 1;

[0509] p is 1;

[0510] L3 comprises one sequence selected from
[0511] (f) a naturally occurring N-terminal flanking region of an ITSM only intracellular domain such as, for example, any of the sequences shown in Table 6 below or a fragment thereof; or,
[0512] (i) a non-naturally occurring sequence comprising between 1 and 500 amino acids; and

[0513] L4 comprises one or more, preferably one or two, sequences selected from the group consisting of:
[0514] (k) a naturally occurring C-terminal flanking region of an ITSM only intracellular domain such as, for example, any of the sequences shown in Table 8 below or a fragment thereof;
[0515] (l) a naturally occurring intracellular domain from a known inhibitory receptor such as any of the sequences shown in table 2 or a fragment thereof wherein said intracellular domain is C-terminally flanking to a sequence in (k) above; and
[0516] (m) a non-naturally occurring sequence comprising between 1 and 500 amino acids, and, wherein.

[0517] 11.2. The N-CAR according to embodiment 6 wherein the intracellular domain comprises the following sequence:

[0518] ((L1-ITIM-L2)ⁿ-(L3-ITSM-L4)^{m})^{p} , wherein

[0519] n is 0;

[0520] m is 1;

[0521] p is 1;

[0522] L3 is selected from

YKMYGSEMLHKRDPLDEDEDTDISYKKLKEEEMAD
CSRAARGTIGARRTGQPLKEDPSAVPVFSVDYGELDFQWREKTPEPPVPC
VPEQ
RIRQKKAQGSTSSTRLHEPEKNAREITQDTNDITYADLNLPKGKKPAPQA
AEPNNH
KTHRRKAARTAVGRNDTHPTTGSASPKHQKKSKLHGPTETSSCSGAAPTV
EMDEELHYASLNFHGMNPSKDTS
KCYFLRKAKAKQMPVEMSRPAVPLLNSNNEKMSDPNMEANSHYGHNDDVR
NHAMKPINDNKEPLNSDVQYTEVQVSSAESHKDLGKKDTE
RRHQGKQNELSDTAGREINLVDAHLKSEQTEASTRQNSQVLLSETGIYDN
DPDLCFRMQEGSEVYSNPCLEENKPGIVYASLNHSVIGPNSRLARNVKEA
P
WRMMKYQQKAAGMSPEQVLQPLEGDLCYADLTLQLAGTSPQKATTKLSSA
QVDQVEVEYVTMASLPKEDISYASLTLGAEDQEPTYCNMGHLSSHLPGRG
PEEP
WRRKRKEKQSETSPKEFLTIYEDVKDLKTRRNHEQEQTFPGGGSTIYSMI
QSQSSAPTSQEPAYTLYSLIQPSRKSGSRKRNHSPSFNS
VRSCRKKSARPAAGVGDTGIEDANAVRGSASQGPLTEPWAEDSPPDQPPP
ASARSSVGEGELQYASLSFQMVKPWDSRGQEATD
NKCGRRNKFGINRPAVLAPEDGLAMSLHFMTLGGSSLSPTEGKGSGLQGH
IIENPQYFSDACVHHIKRRDIVLKWELGEGAFGKVFLAECHNLLPEQDKM
LVAVKALKEASESARQDFQREAELLTMLQHQHIVRFFGVCTEGRPLLMVF
EYMRHGDLNRFLRSHGPDAKLLAGGEDVAPGPLGLGQLLAVASQVAAGMV
YLAGLHFVHRDLATRNCLVGQGLVVKIGDFGMSRDIYS
KLARHSKFGMKGPASVISNDDDSASPLHHISNGSNTPSSSEGGPDAVIIG
MTKIPVIENPQYFGITNSQLKPDTFVQHIKRHNIVLKRELGEGAFGKVFL
AECYNLCPEQDKILVAVKTLKDASDNARKDFHREAELLTNLQHEHIVKFY
GVCVEGDPLIMVFEYMKHGDLNKFLRAHGPDAVLMAEGNPPTELTQSQML
HIAQQIAAGMVYLASQHFVHRDLATRNCLVGENLLVKIGDFGMSRDVYS
KRKGRCSVPAFCSSQAEAPADTPEPTAGHTLYSVLSQGYEKLDTPLRPAR
QQPTPTSDSSSDSNLTTEEDEDRPEVHKPISGRYEVFDQVTQEGAGHDPA
PEGQADYDPVTPYVTEVESVVGENTMYAQVFNLQGKTPVSQKEESSA
KRVQETKFGNAFTEEDSELVVNYIAKKSFCRRAIELTLHSLGVSEELQNK
LEDVVIDRNLLILGKILGEGEFGSVMEGNLKQEDGTSLKVAVKTMKLDNS
SQREIEEFLSEAACMKDFSHPNVIRLLGVCIEMSSQGIPKPMVILPFMKY
GDLHTYLLYSRLETGPKHIPLQTLLKFMVDIALGMEYLSNRNFLHRDLAA
RNCMLRDDMTVCVADFGLSKKIYSGDYYRQGRIAKMPVKWIAIESLADRV
YTSKSDVWAFGVTMWEIATRGM

[0523] and L4 comprises one sequence selected from the group consisting of

[0524] (k)

RTQ
SRP
KIHR
CVRS
KAENIIMMETAQTSL
RKAVPDAVESRYSRTEGSLDGT
RKPQVVPPPQQNDLEIPESPTYENFT
GKSQPKAQNPARLSRKELENFDVYS
VFPSGMGTSSPARRGSADGPRSAQPLRPEDGHCSWPL
QTSPQPASEDTLTYADLDMVHLNRTPKQPAPKPEPSFSEYASVQVPRK
FNLQGKTPVSQKEESSATIYCSIRKPQVVPPPQQNDLEIPESPTYENFT
GGRTMLPIRWMPPESILYRKFTTESDVWSFGVVLWEIFTYGKQPWYQLSN
TEAIDCITQGRELERPRACPPEVYAIMRGCWQREPQQRHSIKDVHARLQA
LAQAPPVYLDVLG
GGHTMLPIRWMPPESIMYRKFTTESDVWSLGVVLWEIFTYGKQPWYQLSN
NEVIECITQGRVLQRPRTCPQEVYELMLGCWQREPHMRKNIKGIHTLLQN
LAKASPVYLDILG
QNHEMYDYLLHGHRLKQPEDCLDELYEIMYSCWRTDPLDRPTFSVLRLQL
EKLLESLPDVRNQADVIYVNTQLLESSEGLAQGSTLAPLDLNIDPDSIIA
SCTPRAAISVVTAEVHDSKPHEGRYILNGGSEEWEDLTSAPSAAVTAEKN
SVLPGERLVRNGVSWSHSSMLPLGSSLPDELLFADDSSEGSEVLM
KDLKTRRNHEQEQTFPGGGSTIYSMIQSQSSAPTSQEPAYTLYSLIQPSR
KSGSRKRNHSPSFNSTIYEVIGKSQPKAQNPARLSRKELENFDVYS

[0525] and optionally
[0526] (l) a naturally occurring intracellular domain from a known inhibitory receptor such as any of the sequences shown in table 2 or a fragment thereof wherein said intracellular domain is C-terminally flanking to a sequence in (k) above. 11.3. The N-CAR according to embodiment 6 wherein the intracellular domain comprises the following sequence:

[0527] ((L1-ITIM-L2)ⁿ-(L3-ITSM-L4)^{m})^{p} , wherein

[0528] n is 0;

[0529] m is 1;

[0530] p is 1;

[0531] L3 is selected from

CSRAARGTIGARRTGQPLKEDPSAVPVFSVDYGELDFQWREKTPEPPVPC
VPEQ
RIRQKKAQGSTSSTRLHEPEKNAREITQDTNDITYADLNLPKGKKPAPQA
AEPNNH
KCYFLRKAKAKQMPVEMSRPAVPLLNSNNEKMSDPNMEANSHYGHNDDVR
NHAMKPINDNKEPLNSDVQYTEVQVSSAESHKDLGKKDTE
RRHQGKQNELSDTAGREINLVDAHLKSEQTEASTRQNSQVLLSETGIYDN
DPDLCFRMQEGSEVYSNPCLEENKPGIVYASLNHSVIGPNSRLARNVKEA
P
WRMMKYQQKAAGMSPEQVLQPLEGDLCYADLTLQLAGTSPQKATTKLSSA
QVDQVEVEYVTMASLPKEDISYASLTLGAEDQEPTYCNMGHLSSHLPGRG
PEEP
WRRKRKEKQSETSPKEFLTIYEDVKDLKTRRNHEQEQTFPGGGSTIYSMI
QSQSSAPTSQEPAYTLYSLIQPSRKSGSRKRNHSPSFNS
VRSCRKKSARPAAGVGDTGIEDANAVRGSASQGPLTEPWAEDSPPDQPPP
ASARSSVGEGELQYASLSFQMVKPWDSRGQEATD
KRKGRCSVPAFCSSQAEAPADTPEPTAGHTLYSVLSQGYEKLDTPLRPAR
QQPTPTSDSSSDSNLTTEEDEDRPEVHKPISGRYEVFDQVTQEGAGHDPA
PEGQADYDPVTPYVTEVESVVGENTMYAQVFNLQGKTPVSQKEESSA

[0532] L4 comprises one sequence selected from the group consisting of

[0533] (k)

SRP
KIHR
CVRS
RKAVPDAVESRYSRTEGSLDGT
RKPQVVPPPQQNDLEIPESPTYENFT
GKSQPKAQNPARLSRKELENFDVYS
VFPSGMGTSSPARRGSADGPRSAQPLRPEDGHCSWPL
QTSPQPASEDTLTYADLDMVHLNRTPKQPAPKPEPSFSEYASVQVPRK

and optionally
[0534] (l) a naturally occurring intracellular domain from a known inhibitory receptor selected from the sequences shown in table 2, preferably KIR2DL2, or a fragment thereof wherein said intracellular domain is C-terminally flanking to a sequence in (k) above. 11.4. The N-CAR according to embodiment 6 wherein the intracellular domain comprises the following sequence:

[0535] ((L1-ITIM-L2)ⁿ-(L3-ITSM-L4)^{m})^{p}, wherein

[0536] n is 0;

[0537] m is 1;

[0538] p is 1;

[0539] L3 is selected from

CSRAARGTIGARRTGQPLKEDPSAVPVFSVDYGELDFQWREKTPEPPVPC
VPEQ

[0540] and L4 comprises

[0541] (k)

VFPSGMGTSSPARRGSADGPRSAQPLRPEDGHCSWPL

[0542] and
[0543] (l) a naturally occurring intracellular domain from a known inhibitory receptor selected from the sequences shown in table 2, preferably KIR2DL2, or a fragment thereof wherein said intracellular domain is C-terminally flanking to a sequence in (k) above. 11.5. The N-CAR according to embodiment 6 wherein the intracellular domain comprises the following sequence:

[0544] ((L1-ITIM-L2)ⁿ-(L3-ITSM-L4)^{m})^{p}, wherein

[0545] n is 0;

[0546] m is 1;

[0547] p is 1;

[0548] L3 is selected from

WRMMKYQQKAAGMSPEQVLQPLEGDLCYADLTLQLAGTSPQKATTKLSSA
QVDQVEVEYVTMASLPKEDISYASLTLGAEDQEPTYCNMGHLSSHLPGRG
PEEP

[0549] L4 comprises a sequence selected from

[0550] (k)

SRP

[0551] and optionally
[0552] (l) a naturally occurring intracellular domain from a known inhibitory receptor selected from the sequences shown in table 2 or a fragment thereof wherein said intracellular domain is C-terminally flanking to a sequence in (k) above.

[0553] 11.6. The N-CAR according to embodiment 6 wherein the intracellular domain comprises the following sequence:

[0554] ((L1-ITIM-L2)ⁿ-(L3-ITSM-L4)^{m})^{p} , wherein

[0555] n is 0;

[0556] m is 1;

[0557] p is 1 or 2;

[0558] L3 comprises one sequence selected from
[0559] (i) a non-naturally occurring sequence comprising between 1 and 500 amino acids; and

[0560] L4 comprises one or more, preferably one or two, sequences selected from:
[0561] (m) a non-naturally occurring sequence comprising between 1 and 500 amino acids.

[0562] 11.7. The N-CAR according to embodiment 6 wherein the intracellular domain is selected from SEQ ID No 2000, SEQ ID No 2001, SEQ ID No 2002, SEQ ID No 2003, SEQ ID No 2004, SEQ ID No 2005, SEQ ID No 2006, SEQ ID No 2007, SEQ ID No 2008, SEQ ID No 2009, SEQ ID No 2010, SEQ ID No 2011, SEQ ID No 2012, SEQ ID No 2013, SEQ ID No 2014, SEQ ID No 2015, SEQ ID No 2016 and SEQ ID No 2017.

[0563] 12. The N-CAR according to any one of embodiments 6 to 11.7 wherein the non-naturally occurring sequence of (d), (i) and (m) comprises between 1 and 400, 1 and 300, 1 and 200, 1 and 100, 10 and 100, 10 and 80, 10 and 60, 10 and 40, 100 and 200, 100 and 300 or 100 and 400.

[0564] 13. The N-CAR according to any one of embodiments 6 to 11.7 wherein the non-naturally occurring sequence of (d) or (i) is a Glycine/Serine linker (GlyₓSer)ₙ where x=1, 2, 3, 4 or 5 and n is 1 to 100.

[0565] 14. The N-CAR according to embodiment 13 wherein the non-naturally occurring sequence of (d) or (i) is a Glycine/Serine linker (Gly-Gly-Gly-Ser)ₙ or (Gly-Gly-Gly-Gly-Ser)ₙ, where n is 1 to 100, 1 to 80, 1 to 50, 1 to 20 or 1 to 10.

[0566] 15. The N-CAR according to embodiment 14 wherein the non-naturally occurring sequence of (d) or (i) is a (Gly₄Ser)₄ or (Gly₄Ser)₃.

[0567] 16. The ICAR according to any one of embodiments 6 to 15 wherein the intracellular domain comprises the sequence (L1-ITIM-L2-L3-ITSM-L4)^{p} wherein

[0568] p is 1, 2, 3, 4 or 5;

[0569] L1 is a naturally occurring N-terminal flanking region of ITIM only intracellular domains selected from the following sequences;

YKMYGSEMLHKRDPLDEDEDTD
DHWALTQRTARAVSPQSTKPMAES
CSRAARGTIGARRTGQPLKEDPSAVPVFS
HRQNQIKQGPPRSKDEEQKPQQRPDLAVDVLERTADKATVNGLPEKDRET
DTSALAAGSSQE
KTHRRKAARTAVGRNDTHPTTGSASPKHQKKSKLHGPTETSSCSGAAPTV
EMDEE
LTRKKKALRIHSVEGDLRRKSAGQEEWSPSAPSPPGSCVQAEAAPAGLCG
EQRGEDCAELHDYFNV
KCYFLRKAKAKQMPVEMSRPAVPLLNSNNEKMSDPNMEANSHYGHNDDVR
NHAMKPINDNKEPLNSD
RRHQGKQNELSDTAGREINLVDAHLKSEQTEASTRQNSQVLLSETGIYDN
DPDLCFRMQEGSEVYSNPCLEENKPG
WRMMKYQQKAAGMSPEQVLQPLEGDLCYADLTLQLAGTSPQKATTKLSSA
QVDQVEVEYVTMASLPKED
KRVQETKFGNAFTEEDSELVVNYIAKKSFCRRAIELTLHSLGVSEELQNK
LEDVVIDRNLLILGKILGEGEFGSVMEGNLKQEDGTSLKVAVKTMKLDNS
SQREIEEFLSEAACMKDFSHPNVIRLLGVCIEMSSQGIPKPMVILPFMKY
GDLHTY

[0570] L2 is absent;

[0571] L3 is a naturally occurring intracellular domain between ITIM and ITSM from proteins that have ITIM.*ITSM motif selected from the following sequences:

KEEEMAD
NFHGMNPSKDTS
QVSSAESHKDLGKKDTE
NLPKGKKPAPQAAEPNNH
NHSVIGPNSRLARNVKEAP
DFQWREKTPEPPVPCVPEQ
TLQLAGTSPQKATTKLSSAQVDQVEVEYVTMASLPKEDISYASLTLGAED
QEPTYCNMGHLSSHLPGRGPEEP
ETGPKHIPLQTLLKFMVDIALGMEYLSNRNFLHRDLAARNCMLRDDMTVC
AVDFGLSKKIYSGDYYRQGRIAKMPVKWIAIESLADRVYTSKSDVWAFGV
TMWEIATRGM

[0572] L4 is a naturally occurring C-terminal flanking region of ITIM.*ITSM intracellular domains selected from the following sequences:

SRP
RTQ
CVRS
KAENIIMMETAQTSL
RKAVPDAVESRYSRTEGSLDGT
VFPSGMGTSSPARRGSADGPRSAQPLRPEDGHCSWPL
QTSPQPASEDTLTYADLDMVHLNRTPKQPAPKPEPSFSEYASVQVPRK
QNHEMYDYLLHGHRLKQPEDCLDELYEIMYSCWRTDPLDRPTFSVLRLQL
EKLLESLPDVRNQADVIYVNTQLLESSEGLAQGSTLAPLDLNIDPDSIIA
SCTPRAAISVVTAEVHDSKPHEGRYILNGGSEEWEDLTSAPSAAVTAEKN
SVLPGERLVRNGVSWSHSSMLPLGSSLPDELLFADDSSEGSEVLM

[0573] or a naturally occurring C-terminal flanking region of ITSM only intracellular domains selected from the following sequences:

RTQ
SRP
CVRS
KAENIIMMETAQTSL
RKAVPDAVESRYSRTEGSLDGT
VFPSGMGTSSPARRGSADGPRSAQPLRPEDGHCSWPL
QTSPQPASEDTLTYADLDMVHLNRTPKQPAPKPEPSFSEYASVQVPRK
FNLQGKTPVSQKEESSATIYCSIRKPQVVPPPQQNDLEIPESPTYENFT
GGRTMLPIRWMPPESILYRKFTTESDVWSFGVVLWEIFTYGKQPWYQLSN
TEAIDCITQGRELERPRACPPEVYAIMRGCWQREPQQRHSIKDVHARLQA
LAQAPPVYLDVLG
GGHTMLPIRWMPPESIMYRKFTTESDVWSLGVVLWEIFTYGKQPWYQLSN
NEVIECITQGRVLQRPRTCPQEVYELMLGCWQREPHMRKNIKGIHTLLQN
LAKASPVYLDILG
QNHEMYDYLLHGHRLKQPEDCLDELYEIMYSCWRTDPLDRPTFSVLRLQL
EKLLESLPDVRNQADVIYVNTQLLESSEGLAQGSTLAPLDLNIDPDSIIA
SCTPRAAISVVTAEVHDSKPHEGRYILNGGSEEWEDLTSAPSAAVTAEKN
SVLPGERLVRNGVSWSHSSMLPLGSSLPDELLFADDSSEGSEVLM
KDLKTRRNHEQEQTFPGGGSTIYSMIQSQSSAPTSQEPAYTLYSLIQPSR
KSGSRKRNHSPSFNSTIYEVIGKSQPKAQNPARLSRKELENFDVYS.

[0574] 17. The N-CAR according to any one of the preceding embodiments wherein the term amino acid refers to glycine, alanine, valine, leucine, isoleucine, phenylalanine, proline, serine, threonine, tyrosine, cysteine, methionine, lysine, arginine, histidine, tryptophan, aspartic acid, glutamic acid, asparagine or glutamine.

[0575] 18. The N-CAR according to any one of the preceding embodiments wherein X₁ is E, V or I.

[0576] 19. The N-CAR any one of the preceding embodiments wherein X₁ is E.

[0577] 20. The N-CAR any one of the preceding embodiments wherein X₂ is S or A.

[0578] 21. The N-CAR any one of the preceding embodiments wherein X₂ is A.

[0579] 22. The N-CAR any one of the preceding embodiments wherein X₃ is E, S, T, Q or V.

[0580] 23. The N-CAR any one of the preceding embodiments wherein X₃ is E.

[0581] 24. The N-CAR any one of the preceding embodiments wherein X₃ is T.

[0582] 25. The N-CAR any one of the preceding embodiments wherein X₂ is I.

[0583] 26. The N-CAR according to any one of embodiments 7 to 25 wherein X₅ is L, V or I

[0584] 27. The N-CAR according to any one of embodiments 7 to 26 wherein X₅ is L.

[0585] 28. The N-CAR according to any one of embodiments 7 to 26 wherein X₅ is V

[0586] 29. The N-CAR according to any one of embodiments 7 to 26 wherein X₅ is I.

[0587] 30. The N-CAR according to any one of embodiments 7 to 29 wherein X₆ is A, H, Q, T, D, V, L or E.

[0588] 31. The N-CAR according to any one of embodiments 7 to 30 wherein X₆ is H.

[0589] 32. The N-CAR according to any one of embodiments 7 to 30 wherein X₆ is D.

[0590] 33. The N-CAR according to any one of embodiments 7 to 32 wherein X₇ is A, G, T, V or E.

[0591] 34. The N-CAR according to any one of embodiments 7 to 33 wherein X₇ is A.

[0592] 35. The N-CAR according to any one of embodiments 7 to 33 wherein X₇ is G.

[0593] 36. The N-CAR according to any one of embodiments 7 to 35 wherein X₈ is V, S, D or E.

[0594] 37. The N-CAR according to any one of embodiments 7 to 36 wherein X₈ is S or E.

[0595] 38. The N-CAR according to any one of embodiments 7 to 37 wherein X₈ is E.

[0596] 39. The N-CAR according to any one of embodiments 7 to 38 wherein X₉ is L or V.

[0597] 40. The N-CAR according to any one of embodiments 7 to 38 wherein X₉ is L.

[0598] 41. The N-CAR according to any one of embodiments 7 to 40 wherein X₅ is L or V, X₈ is E and X₉ is L.

[0599] 42. The N-CAR any one of the preceding embodiments wherein the ITSM, or at least one of the ITSMs when several ITSMs are present in the intracellular domain, is selected from TAYELV, TAYGLI, TAYNAV, TCYGLV, TCYPDI, TDYASI, TDYDLV, TDYLSI, TDYQQV, TDYYRV, TEYASI, TEYATI, TEYDTI, TEYPLV, TEYSEI, TEYSEV, TEYSTI, TEYTKV, TFYHVV, TFYLLI, TFYNKI, TFYPDI, TGYEDV, TGYLSI, THYKEI, TIYAQV, TIYAVV, TIYCSI, TIYEDV, TIYERI, TIYEVI, TIYHVI, TIYIGV, TIYLKV, TIYSMI, TIYSTI, TIYTYI, TKYFHI, TKYMEI, TKYQSV, TKYSNI, TKYSTV, TLYASV, TLYAVV, TLYFWV, TLYHLV, TLYPMV, TLYPPI, TLYRDI, TLYRDV, TLYSKI, TLYSLI, TLYSPV, TMYAQV, TMYCQV, TNYKAV, TNYNLV, TPYAGI, TPYPGV, TPYVDI, TQYGRV, TQYNQV, TRYAYV, TRYGEV, TRYHSV, TRYKTI, TRYLAI, TRYMAI, TRYQKI, TRYQQI, TRYSNI, TRYSPI, TSYGTV, TSYMEV, TSYQGV, TSYTTI, TTYRSI, TTYSDV, TTYVTI, TVYAQI, TVYASV, TVYEVI, TVYGDV, TVYKGI, TVYQRV, TVYSEV, TVYSTV, TYYHSI, TYYLQI, or TYYYSV.

[0600] 43. The N-CAR any one of the preceding embodiments wherein the ITSM, or at least one of the ITSMs when several ITSMs are present in the intracellular domain is TEYASI.

[0601] 44. The N-CAR any one of the preceding embodiments wherein the ITSM, or at least one of the ITSMs when several ITSMs are present in the intracellular domain is TEYSEI.

[0602] 44.1 The N-CAR any one of the preceding embodiments wherein the ITSM, or at least one of the ITSMs when several ITSMs are present in the intracellular domain is TEYSTI.

[0603] 45. The N-CAR any one of the preceding embodiments wherein the ITSM, or at least one of the ITSMs when several ITSMs are present in the intracellular domain is TVYSEV.

[0604] 46. The N-CAR according to any one of embodiments 7 to 45 wherein the ITIM, or at least one of the ITIMs when several ITSMs are present in the intracellular domain is selected from LSYRSL, LPYYDL, LPYYDL, LLYSRL, LLYSRL, LIYTLL, LLYADL, ISYTTL, VTYSAL, IHYSEL, VDYVIL, LHYASL, LDYDYL, VDYDFL, VTYSTL, IIYSEV, LEYLCL, VLYGQL, VPYTPL, ISYPML, ISYPML, ISYPML, VSYTNL, LLYEMV, VDYNLV, ITYFAL, VHYQSV, VPYVMV, IPYRTV, IAYSLL, VCYGRL, LKYLYL, LLYEHV, ITYSLL, VLYSEL, IWYNIL, ISYKGL, IDYYNL, LEYLQL, LKYRGL, VLYASV, LQYLSL, LFYRHL, VQYKAV, LSYSSL, LSYTKV, VQYSTV, VKYNPV, VVYSEV, VVYSEV, IIYSEV, LEYVSV, LAYHTV, VQYLRL, VTYTQL, IVYTEL, VTYTQL, IVYAEL, VTYAQL, IVYTEL, VTYAQL, IVYTEL, VTYAQL, VTYAQL, VTYAQL, ILYTEL, VTYAQL, VTYAQL, ITYAAV, VTYAQL, ITYAAV, VIYIDV, VTYAEV, VTYAQL, VTYAQL, VTYAPV, VTYAQL, VTYAKV, VTYARL, VTYAQL, ILYHTV, LLYSRL, VLYAML, VIYAQL, LVYENL, LCYADL, ISYASL, LTYVLL, VTYVNL, VRYSIV, VFYRQV, VFYRQV, LKYMEV, LKYMEV, VDYGEL, LSYMDL, VLYTAV, VQYTEV, IVYASL, VEYLEV, LEYVDL, ITYADL, LTYADL, ITYADL, LTYADL, VIYENV, VIYENV, VIYENV, VIYENV, LAYYTV, VSYSAV, LVYDKL, LNYMVL, LNYACL, LDYINV, LHYATL, LHYASL, LHYASL, LHYAVL, IQYAPL, IQYASL, IQYASL, LLYLLL, VVYSQV, VIYSSV, VVYSQV, VIYSSV, VVYYRV, VPYVEL, LDYDKL, LPYYDL, LSYPVL, VAYSQV, LFYWDV, LFYWDV, LIYSQV, or LDYEFL.

[0605] 47. The N-CAR according to any one of embodiments 7 to 45 wherein the ITIM, or at least one of the ITIMs when several ITSMs are present in the intracellular domain is selected IAYGDI, IAYRDL, IAYSLL, IAYSRL, ICYALL, ICYDAL, ICYPLL, ICYQLI, IDYILV, IDYKTL, IDYTQL, IDYYNL, IEYCKL, IEYDQI, IEYGPL, IEYIRV, IEYKSL, IEYKTL, IEYSVL, IEYWGI, IFYGNV, IFYHNL, IFYKDI, IFYQNV, IFYRLI, IGYDIL, IGYDVL, IGYICL, IGYKAI, IGYLEL, IGYLPL, IGYLRL, IGYPFL, IGYSDL, IHYRQI, IHYSEL, IIYAFL, IIYHVI, IIYMFL, IIYNLL, IIYNNL, IIYSEV, IKYCLV, IKYKEL, IKYLAL, IKYTCI, ILYADI, ILYAFL, ILYCSV, ILYEGL, ILYELL, ILYFQI, ILYHTV, ILYLQV, ILYSIL, ILYSVL, ILYTEL, ILYTIL, IMYTLV, INYCSV, INYKDI, INYTTV, INYVLL, IPYDVL, IPYLLV, IPYRTV, IPYSQL, IPYSRI, IPYTQI, IQYAPL, IQYASL, IQYERL, IQYGII, IQYGNV, IQYGRV, IQYNVV, IQYRSI, IQYTEL, IQYWGI, IRYANL, IRYLDL, IRYPLL, IRYRLL, IRYRTI, ISYASL, ISYCGV, ISYEPI, ISYFQI, ISYGLI, ISYKKL, ISYLPL, ISYPML, ISYTTL, ITYAAV, ITYADL, ITYAEL, ITYAEV, ITYASV, ITYDLI, ITYENV, ITYQLL, ITYSLL, IVYAEL, IVYALV, IVYASL, IVYEIL, IVYFIL, IVYHML, IVYLCI, IVYRLL, IVYSAL, IVYSWV, IVYTEL, IVYYIL, IWYENL, IWYFVV, IWYNIL, IYYLGV, LAYALL, LAYARI, LAYDSV, LAYFGV, LAYHRL, LAYKDL, LAYKRI, LAYPPL, LAYQTL, LAYREV, LAYRII, LAYRLL, LAYSQL, LAYSSV, LAYTLL, LAYWGI, LAYYTV, LCYADL, LCYAIL, LCYFHL, LCYHPI, LCYKEI, LCYKFL, LCYMII, LCYRKI, LCYRVL, LCYSTV, LCYTLV, LDYASI, LDYCEL, LDYDKI, LDYDKL, LDYDYL, LDYDYV, LDYEFL, LDYINV, LDYNNL, LDYPHV, LDYSPV, LDYVEI, LDYWGI, LEYAPV, LEYIPL, LEYKTI, LEYLCL, LEYLKL, LEYLQI, LEYLQL, LEYQRL, LEYVDL, LEYVSV, LEYYQI, LFYAQL, LFYCSV, LFYERV, LFYGFL, LFYKYV, LFYLLL, LFYNKV, LFYRHL, LFYTLL, LFYWDV, LFYWKL, LGYGNV, LGYKEL, LGYLQL, LGYPLI, LGYPWV, LGYSAL, LGYSDL, LGYVTL, LHYAKI, LHYALV, LHYANL, LHYARL, LHYASI, LHYASL, LHYASV, LHYATI, LHYATL, LHYAVL, LHYDVV, LHYEGL, LHYETI, LHYFEI, LHYFVV, LHYGAI, LHYILI, LHYINL, LHYKRI, LHYLDL, LHYLNI, LHYLTI, LHYLVI, LHYMAI, LHYMII, LHYMNI, LHYMTI, LHYMTL, LHYMTV, LHYMVI, LHYNML, LHYPAL, LHYPDL, LHYPII, LHYPIL, LHYPLL, LHYPML, LHYPNV, LHYPSI, LHYPTI, LHYPTL, LHYPTV, LHYPVI, LHYPVL, LHYRII, LHYRTI, LHYSII, LHYSSI, LHYSTI, LHYSTL, LHYSVI, LHYTAI, LHYTAL, LHYTII, LHYTKV, LHYTLI, LHYTSI, LHYTTI, LHYTTV, LHYTVI, LHYTVL, LHYTVV, LHYVSI, LHYVTI, LHYVVI, LIYEKL, LIYENV, LIYKDL, LIYNSL, LIYSGL, LIYTLL, LIYTVL, LIYWEI, LKYCEL, LKYDKL, LKYESL, LKYFTI, LKYHTV, LKYILL, LKYIPI, LKYKHV, LKYLYL, LKYMEV, LKYMTL, LKYPAI, LKYPDV, LKYPEL, LKYQPI, LKYRGL, LKYRLL, LLYADL, LLYAPL, LLYAVV, LLYCAI, LLYEHV, LLYELL, LLYEQL, LLYGQI, LLYIRL, LLYKAL, LLYKFL, LLYKLL, LLYKTV, LLYMVV, LLYNAI, LLYNIV, LLYNVI, LLYPAI, LLYPLI, LLYPNI, LLYPSL, LLYPTI, LLYPVI, LLYPVV, LLYQIL, LLYQNI, LLYRLL, LLYRVI, LLYSII, LLYSLI, LLYSPV, LLYSRL, LLYSTI, LLYSVI, LLYSVV, LLYTTI, LLYTVI, LLYTVV, LLYVII, LLYVIL, LLYVTI, LLYWGI, LLYYLL, LLYYVI, LMYDNV, LMYMVV, LMYQEL, LMYRGI, LNYACL, LNYATI, LNYEVI, LNYGDL, LNYHKL, LNYMVL, LNYNIV, LNYPVI, LNYQMI, LNYSGV, LNYSVI, LNYTIL, LNYTTI, LNYVPI, LPYADL, LPYALL, LPYFNI, LPYFNV, LPYHDL, LPYKLI, LPYKTL, LPYLGV, LPYLKV, LPYPAL, LPYQVV, LPYRTV, LPYVEI, LPYYDL, LQYASL, LQYERI, LQYFAV, LQYFSI, LQYHNI, LQYIGL, LQYIKI, LQYLSL, LQYMIV, LQYPAI, LQYPLL, LQYPLV, LQYPSI, LQYPTL, LQYPVL, LQYRAV, LQYSAI, LQYSSI, LQYSVI, LQYTIL, LQYTLI, LQYTMI, LQYYQV, LRYAAV, LRYAGL, LRYAPL, LRYASI, LRYATI, LRYATV, LRYAVL, LRYCGI, LRYELL, LRYETL, LRYGAL, LRYGPI, LRYGTL, LRYHHI, LRYHSI, LRYHVL, LRYIAI, LRYIFV, LRYITV, LRYKEV, LRYKKL, LRYKMV, LRYKSL, LRYKVI, LRYLAI, LRYLDL, LRYLTI, LRYLTV, LRYMSI, LRYMVI, LRYNCI, LRYNGL, LRYNII, LRYNIL, LRYNKI, LRYNSL, LRYNVI, LRYNVL, LRYPFL, LRYPII, LRYPIL, LRYPLL, LRYPNI, LRYPSI, LRYPTI, LRYPTL, LRYPVI, LRYPVL, LRYQKL, LRYQMI, LRYQNL, LRYRLI, LRYRVI, LRYSAI, LRYSDL, LRYSII, LRYSMI, LRYSSI, LRYSTI, LRYSTL, LRYSVI, LRYSVL, LRYSVV, LRYTAI, LRYTIL, LRYTLI, LRYTMI, LRYTNL, LRYTPV, LRYTSI, LRYTSV, LRYTTI, LRYTTV, LRYTVI, LRYVEV, LRYVTI, LRYVTV, LSYDSL, LSYEDV, LSYFGV, LSYILI, LSYISV, LSYKQV, LSYKRL, LSYLDV, LSYMDL, LSYNAL, LSYNDL, LSYNKL, LSYNQL, LSYPVL, LSYQEV, LSYQPV, LSYQTI, LSYRSL, LSYRSV, LSYSII, LSYSSL, LSYSTL, LSYTKV, LSYTSI, LSYTTI, LSYVLI, LTYADL, LTYAEL, LTYAQV, LTYARL, LTYCDL, LTYCGL, LTYCVL, LTYEEL, LTYEFL, LTYGEV, LTYGRL, LTYKAL, LTYLRL, LTYMTL, LTYNTL, LTYPGI, LTYQSV, LTYSSV, LTYTTV, LVYDAI, LVYDKL, LVYDLV, LVYENL, LVYGQL, LVYHKL, LVYQEV, LVYRKV, LVYRNL, LVYSEI, LVYTNV, LVYWEI, LVYWKL, LVYWRL, LWYEGL, LWYKYI, LWYNHI, LWYTMI, LYYCQL, LYYGDL, LYYKKV, LYYLLI, LYYPKV, LYYRRV, LYYSTI, LYYVRI, LYYVVI, SAYATL, SAYCPL, SAYPAL, SAYQAL, SAYQTI, SAYRSV, SAYTAL, SAYTPL, SAYVVL, SCYAAV, SCYCII, SCYCLL, SCYDFL, SCYEEL, SCYEKI, SCYHIL, SCYPYI, SCYRIL, SCYRTL, SDYCNL, SDYEDL, SDYENV, SDYESV, SDYFIV, SDYHTL, SDYLAI, SDYLDI, SDYLEL, SDYQDL, SDYQRL, SDYSVI, SDYTHL, SEYASV, SEYEEL, SEYFEL, SEYGEL, SEYITL, SEYKAL, SEYKEL, SEYKGI, SEYLAI, SEYLEI, SEYMVI, SEYQSI, SEYRPI, SEYSEI, SEYSSI, SEYTPI, SEYTYV, SFYAAL, SFYDSL, SFYKGL, SFYLYV, SFYNAV, SFYPSV, SFYQQI, SFYQQL, SFYSAL, SFYSDI, SFYSKL, SFYSRV, SFYWNV, SFYYLI, SGYAQL, SGYATL, SGYEKL, SGYQLV, SGYQRI, SGYRRL, SGYSHL, SGYSQL, SGYTLI, SGYTRI, SGYYRV, SHYADV, SHYFPL, SHYIDI, SHYKRL, SHYQVV, SIYAPL, SIYATL, SIYEEL, SIYEEV, SIYELL, SIYEVL, SIYGDL, SIYKKL, SIYLNI, SIYLVI, SIYRYI, SIYSWI, SKYKEI, SKYKIL, SKYKSL, SKYLAV, SKYLGV, SKYNIL, SKYQAV, SKYSDI, SKYSSL, SKYVGL, SKYVSL, SLYANI, SLYAQV, SLYAYI, SLYDDL, SLYDFL, SLYDNL, SLYDSI, SLYDYL, SLYEGL, SLYEHI, SLYELL, SLYHCL, SLYHKL, SLYIGI, SLYKKL, SLYKNL, SLYLAI, SLYLGI, SLYNAL, SLYNLL, SLYRNI, SLYSDV, SLYTCV, SLYTTL, SLYVAI, SLYVDV, SLYVSI, SLYYAL, SLYYNI, SLYYPI, SMYDGL, SMYEDI, SMYNEI, SMYQSV, SMYTWL, SMYVSI, SNYENL, SNYGSL, SNYGTI, SNYLVL, SNYQEI, SNYRLL, SNYRTL, SNYSDI, SNYSLL, SPYAEI, SPYATL, SPYEKV, SPYGDI, SPYGGL, SPYNTL, SPYPGI, SPYPGV, SPYQEL, SPYRSV, SPYSRL, SPYTDV, SPYTSV, SPYVVI, SQYCVL, SQYEAL, SQYKRL, SQYLAL, SQYLRL, SQYMHV, SQYSAV, SQYTSI, SQYWRL, SRYAEL, SRYATL, SRYESL, SRYGLL, SRYLSL, SRYMEL, SRYMRI, SRYPPV, SRYQAL, SRYQQL, SRYRFI, SRYRFV, SRYSAL, SRYSDL, SRYTGL, SRYVRL, SSYDEL, SSYEAL, SSYEIV, SSYEPL, SSYGRL, SSYGSI, SSYGSL, SSYHII, SSYHIL, SSYHKL, SSYHNI, SSYIKV, SSYNSV, SSYQEI, SSYRKV, SSYRRV, SSYSDI, SSYTPL, SSYTRL, SSYTSV, SSYTTI, SSYVKL, STYAEV, STYAGI, STYAHL, STYALV, STYAPI, STYDHV, STYDKV, STYDQV, STYDRI, STYEEL, STYEYL, STYILV, STYLPL, STYMAV, STYQTL, STYRKL, STYSQL, STYTSI, STYYQV, SVYATL, SVYCFL, SVYCNL, SVYDSV, SVYDTI, SVYEKV, SVYEML, SVYGSV, SVYPII, SVYQPI, SVYRKV, SVYSHL, SVYSRV, SVYTAL, SVYTEL, SVYWKV, SWYDSI, SWYFTV, SYYKAI, SYYLKL, SYYSFV, SYYVTI, VAYADL, VAYARI, VAYARV, VAYDQL, VAYGHV, VAYKQV, VAYKRL, VAYNLL, VAYQRV, VAYSGV, VAYSQV, VCYCIV, VCYGLV, VCYGRL, VCYIVV, VCYLLV, VDYDCI, VDYDFL, VDYFTI, VDYFVL, VDYGEL, VDYILV, VDYIQV, VDYKNI, VDYMSI, VDYNLV, VDYPDV, VDYSDL, VDYSSV, VDYTTL, VDYVDV, VDYVGV, VDYVIL, VDYVQV, VEYAPL, VEYDPL, VEYGTI, VEYHRL, VEYLEV, VEYQLL, VEYRPL, VEYSSI, VEYSTV, VFYAEI, VFYLAV, VFYRQV, VFYVGV, VFYYVI, VFYYVL, VGYETI, VHYALL, VHYARL, VHYETL, VHYGGV, VHYHSL, VHYIPV, VHYKEI, VHYLQV, VHYNSL, VHYQSV, VHYRSL, VIYAQL, VIYDRL, VIYENV, VIYEPL, VIYERL, VIYIDV, VIYKKI, VIYKRI, VIYPFL, VIYPNI, VIYSDL, VIYSML, VIYSSV, VIYSWI, VKYADI, VKYARL, VKYATL, VKYEGL, VKYGDL, VKYGSV, VKYLLV, VKYNPV, VKYPPI, VKYQRL, VKYQVI, VKYSEV, VKYSNV, VKYSRL, VKYSTL, VKYVDL, VLYADI, VLYAML, VLYASV, VLYCLL, VLYCLV, VLYCVL, VLYDCL, VLYFHI, VLYFTV, VLYGDL, VLYGQL, VLYPMV, VLYPRL, VLYPRV, VLYSEL, VLYSRV, VLYTAV, VLYTIL, VMYDAV, VNYESI, VNYSAL, VNYSKI, VNYSSI, VPYALL, VPYDTL, VPYEDV, VPYEEL, VPYKTI, VPYLRV, VPYNDL, VPYPAL, VPYQEL, VPYRLL, VPYSEL, VPYTLL, VPYTPL, VPYTTL, VPYVEL, VPYVMV, VPYVSL, VQYKAV, VQYKEI, VQYNIV, VQYRPV, VQYSQI, VQYSTV, VQYTEV, VQYYNI, VRYARL, VRYDNL, VRYGRI, VRYKKL, VRYKRV, VRYLDV, VRYRTI, VRYSDI, VRYTQL, VRYVCL, VSYAEL, VSYASV, VSYEPI, VSYGDI, VSYIGL, VSYILV, VSYMML, VSYNNI, VSYNNL, VSYQEI, VSYQPI, VSYSAV, VSYSFL, VSYSLV, VSYSPV, VSYTML, VSYTNL, VSYTPL, VSYVKI, VSYVLL, VTYADL, VTYAEL, VTYAEV, VTYAKV, VTYAPV, VTYAQL, VTYATL, VTYATV, VTYGNI, VTYITI, VTYQII, VTYQIL, VTYQLL, VTYSAL, VTYSTL, VTYTLL, VTYTQL, VTYVNL, VVYADI, VVYEDV, VVYFCL, VVYKTL, VVYQKL, VVYSEV, VVYSQV, VVYSVV, VVYTVL, VVYYRI, VYYHWL or VYYLPL.

[0606] 48. The N-CAR according to any one of the preceding embodiments wherein the intracellular domain comprises several ITSMs having the same amino acid sequence.

[0607] 49. The N-CAR according to any one of the preceding embodiments wherein the intracellular domain comprises several ITSMs having different amino acid sequences.

[0608] 50. The N-CAR any one of the preceding embodiments wherein the intracellular domain comprises several ITIMs having the same amino acid sequence.

[0609] 51. The N-CAR any one of the preceding embodiments wherein the intracellular domain comprises several ITIMs having different amino acid sequences.

[0610] 52. The N-CAR according to any one of embodiments 7 to 51 wherein p is 1, 2, 3, 4, 5, 6, 7, 8, 9, 10, 11, 12, 13, 14, 15, 16, 17, 18, 19 or 20.

[0611] 53. The N-CAR according to any one of embodiments 7 to 51 wherein p is 1.

[0612] 54. The N-CAR according to any one of embodiments 7 to 51 wherein p is 2.

[0613] 55. The N-CAR according to any one of embodiments 7 to 51 wherein p is 3.

[0614] 56. The N-CAR according to any one of embodiments 7 to 51 wherein p is 4.

[0615] 57. The N-CAR according to any one of embodiments 7 to 51 wherein p is 5.

[0616] 58. The N-CAR according to any one of embodiments 7 to 57 wherein n is 0, 1, 2, 3, 4, 5, 6, 7, 8, 9, or 10.

[0617] 59. The N-CAR according to any one of embodiments 7 to 57 wherein n is 0.

[0618] 60. The N-CAR according to any one of embodiments 7 to 57 wherein n is 1.

[0619] 61. The N-CAR according to any one of embodiments 7 to 57 wherein n is 2.

[0620] 62. The N-CAR according to any one of embodiments 7 to 57 wherein n is 3.

[0621] 63. The N-CAR according to any one of embodiments 7 to 62 wherein m is 1, 2, 3, 4, 5, 6, 7, 8, 9, 10, 11, 12, 13, 14, 15, 16, 17, 18, 19 or 20.

[0622] 64. The N-CAR according to any one of embodiments 7 to 62 wherein m is 1, 2, 3, 4, 5, 6, 7, 8, 9, or 10.

[0623] 65. The N-CAR according to any one of embodiments 7 to 62 wherein m is 1, 2, 3, 4 or 5.

[0624] 66. The N-CAR according to any one of embodiments 7 to 62 wherein m is 1.

[0625] 67. The N-CAR according to any one of embodiments 7 to 62 wherein m is 2.

[0626] 68. The N-CAR according to any one of embodiments 7 to 62 wherein m is 3.

[0627] 69. The N-CAR according to any one of embodiments 7 to 62 wherein m is 4.

[0628] 70. The N-CAR according to any one of embodiments 7 to 62 wherein m is 5.

[0629] 71. The N-CAR according to any one of embodiments 7 to 51 wherein n is 0, m is 1 to 6 and p is 1 and ITSM is TEYATI.

[0630] 72. The N-CAR according to any one of embodiments 7 to 51 wherein n is 0, m is 1 to 6 and p is 1 and ITSM is TEYSEI.

[0631] 73. The N-CAR according to any one of embodiments 7 to 51 wherein n is 0, m is 1 to 6 and p is 1 and ITSM is TEYASI.

[0632] 74. The N-CAR according to any one of embodiments 7 to 51 wherein n is 1, m is 1 and p is 1 to 5 and ITIM is VDYGEL and ITSM is TEYATI.

[0633] 75. The N-CAR according to any one of embodiments 7 to 51 wherein n is 1, m is 1 and p is 1 to 5 and ITIM is LX₆YAX₈L wherein X₆ is selected from H or Q and X₈ is V or S, and ITSM is TEYSEI.

[0634] 76. The N-CAR according to any one of embodiments 1 to 75 wherein the intracellular domain comprises several ITSMs having the same amino acid sequence.

[0635] 77. The N-CAR according to any one of embodiments 1 to 75 wherein the intracellular domain comprises several ITSMs having different amino acid sequences.

[0636] 78. The N-CAR according to any one of embodiments 1 to 75 wherein the intracellular domain comprises several ITIMs having the same amino acid sequence.

[0637] 79. The N-CAR according to any one of embodiments 1 to 75 wherein the intracellular domain comprises several ITIMs having different amino acid sequences.

[0638] 80. The N-CAR according to any one of embodiments 1 to 79, wherein the antigen binding domain is a single chain variable fragment (scFv).

[0639] 81. The N-CAR according to any one of embodiments 1 to 79, wherein the antigen binding domain is a Fv, a Fab, or a (Fab′)2.

[0640] 82. The N-CAR according to any one of embodiments 1 to 81, wherein the antigen binding domain binds to ITGAX, CD1E, CD34, CD1C, CD123 or CD141.

[0641] 83. The N-CAR according to any one of embodiments 1 to 81, wherein the antigen binding domain binds to ZP2, GABRA6, CRTAM or GRM4, or MDGA1.

[0642] 84. The N-CAR according to any one of embodiments 1 to 81, wherein the antigen binding domain binds to SFTPC, ROS1, SLC6A4 or AGTR2.

[0643] 85. The N-CAR according to any one of embodiments 1 to 81, wherein the antigen binding domain binds to LRRC26, HTR3A, TMEM211 or MRGPRX3.

[0644] 86. The N-CAR according to any one of embodiments 1 to 81, wherein the antigen binding domain binds to MEP1B, TMIGD1, CEACAM20, or ALPI.

[0645] 87. The N-CAR according to any one of embodiments 1 to 81, wherein the antigen binding domain binds to TMPRSS11B, CYP17A1 or ATP4B.

[0646] 88. The N-CAR according to any one of embodiments 1 to 81, wherein the antigen binding domain binds to GP2, MUC21, CLCA4 and SLC27A6.

[0647] 89. The N-CAR according to any one of embodiments 1 to 81, wherein the antigen binding domain binds to a cell-surface protein present in normal tissue but not present or present at lower level on a tumor

[0648] 90. The N-CAR according to any one of embodiments 1 to 81 wherein the antigen binding domain binds to an off-tissue antigen.

[0649] 91. The N-CAR according to any one of embodiments 1 to 90 wherein the transmembrane domain comprises the transmembrane region(s) of the alpha, beta or zeta chain of the T-cell receptor, PD-1, 4-1BB, OX40, ICOS, CTLA-4, LAG3, 2B4, BTLA4, TIM-3, TIGIT, SIRPA, CD28, CD3 epsilon, CD45, CD4, CDS, CD8, CD9, CD16, CD22, CD33, CD37, CD64, CD80, CD86, CD134, CD137 or CD154.

[0650] 92. The N-CAR according to any one of embodiments 1 to 91 wherein the transmembrane domain comprises the transmembrane region of PD-1.

[0651] 93. The N-CAR according to any one of embodiments 1 to 92 wherein the transmembrane domain comprises the transmembrane region(s) of CD8 alpha.

[0652] 94. The N-CAR according to any one of embodiments 1 to 93 wherein the transmembrane domain is attached to the extracellular domain of the N-CAR via a hinge.

[0653] 95. The N-CAR according to embodiment 94 wherein the hinge is a human immunoglobulin hinge.

[0654] 96. The N-CAR according to embodiment 94 wherein the hinge is an IgG4 hinge, a CD8 alpha hinge or a PD-1 hinge.

[0655] 96.1 The N-CAR according to embodiment 94 wherein the hinge is a PD-1 hinge.

[0656] 97. An isolated immune cell comprising a P-CAR comprising,

[0657] an extracellular domain comprising an antigen binding domain ,

[0658] a transmembrane domain

[0659] an intracellular domain

[0660] and an N-CAR according to any one of embodiments 1 to 96.

[0661] 98. The immune cell according to embodiment 97, wherein the antigen to which the antigen binding domain of the P-CAR binds is CD33 and the antigen to which the antigen binding domain of the N-CAR binds is ITGAX, CD1E, CD34, CD1C, CD123, or CD141.

[0662] 99. The immune cell according to embodiment 97, wherein the antigen to which the antigen binding domain of the P-CAR binds is FLT3 and the antigen to which the antigen binding domain of the N-CAR binds is ZP2, GABRA6, CRTAM, GRM4 or MDGA1.

[0663] 100. The immune cell according to embodiment 97, wherein the antigen to which the antigen binding domain of the P-CAR binds is MSLN and the antigen to which the antigen binding domain of the N-CAR binds is SFTPC, ROS1, SLC6A4 or AGTR2.

[0664] 101. The immune cell according to embodiment 97, wherein the antigen to which the antigen binding domain of the P-CAR binds is MUC16 and the antigen to which the antigen binding domain of the N-CAR binds is LRRC26, HTR3A, TMEM211 or MRGPRX3.

[0665] 102. The immune cell according to embodiment 97, wherein the antigen to which the antigen binding domain of the P-CAR binds is MUC17 and the antigen to which the antigen binding domain of the N-CAR binds is MEP1B, TMIGD1, CEACAM20 or ALPI.

[0666] 103. The immune cell according to embodiment 97, wherein the antigen to which the antigen binding domain of the P-CAR binds is present in tumor cells of pancreatic ductal adenocarcinoma and the antigen to which the antigen binding domain of the N-CAR binds is TMPRSS11B, CYP17A1 or ATP4B.

[0667] 104. The immune cell according to embodiment 97, wherein the antigen to which the antigen binding domain of the P-CAR binds is present in tumor cells of kidney clear cell carcinoma and the antigen to which the antigen binding domain of the N-CAR binds is GP2, MUC21, CLCA4 and SLC27A6.

[0668] 105. The immune cell according to any one of embodiments 97 to 104 wherein the immune cell is a T-cell.

[0669] 106. The immune cell according to embodiment 105 wherein the T-cell is a human T-cell.

[0670] 107. The immune cell according to any one of embodiments 97 to 106 for its use as a medicament.

[0671] 108. The immune cell according to any one of embodiments 97 to 106 for its use for the treatment of cancer.

[0672] 109. The immune cell according to any one of embodiments 97 to 106 derived from inflammatory T- lymphocytes, cytotoxic T-lymphocytes, regulatory T-lymphocytes or helper T- lymphocytes.

[0673] 110. A method of engineering an immune cell according to any one of embodiments 97 to 109 comprising: (a) Providing an immune cell; (b) expressing the N-CAR and the P-CAR at the surface of said cells.

[0674] 111. A method of engineering an immune cell of embodiment 110 comprising: (a) providing an immune cell; (b) introducing into said cell at least one polynucleotide encoding the N-CAR and at least one polynucleotide encoding the P-CAR; (c) expressing said polynucleotides into said cell.

[0675] 112. A method for treating a patient in need thereof comprising: a) providing an immune cell according to any one of embodiments 97 to 109, and; b) administrating said T-cells to said patient.

[0676] 113. The method for treating a patient of embodiment 112 wherein said immune cells are recovered from donors.

[0677] 114. The method for treating a patient of embodiment 113 wherein said immune cells are recovered from patients.

[0678] 115. The immune cell according to any one of embodiments 97 to 109 wherein the reduction of activation of the immune cells when both the P-CAR and N-CAR bind to their respective antigens is increased, preferably by at least 5%, 10%, 15%, 20% or 30% as compared to the same immune cell comprising an N-CAR comprising the full intracellular domain of PD-1.

[0679] 116. The immune cell according to any one of embodiments 97 to 109 wherein the reduction of activation of the immune cells when both the P-CAR and N-CAR bind to their respective antigens is increased, preferably by at least 5%, 10%, 15%, 20% or 30% as compared to the same immune cell comprising an N-CAR comprising the full intracellular domain of CTLA-4.

[0680] 117. The immune cell according to any one of embodiments 97 to 109 wherein the activation of the immune cells is reduced by at least 5%, 10%, 15%, 20%, 25%, 30%, 35%, 40%, 45%, 50%, 55%, 60%, 65%, 70%, 75%, 80%, 85% when the N-CAR and P-CAR antigen binding domains both binds to their respective antigens as compared to when only the P-CAR antigen binding domain binds to its antigen.

[0681] 118. The immune cell according to any one of embodiments 115 to 117 wherein the level of activation of the immune cell is determined by measuring cytokine production.

[0682] 119. The immune cell according to embodiment 118 wherein the cytokine is IFNgamma or TNFalpha.

[0683] 120. The immune cell according to embodiment 118 or 119 wherein the cytokine production is measured by ELISA and/or FACS and/or luminex.

[0684] 121. The immune cell according to any one of embodiments 115 to 117 wherein the level of activation of the immune cell is determined by the level of degranulation.

[0685] 122. The immune cell according to embodiment 121 wherein degranulation is measured by measuring expression of CD107a by FACS.

[0686] 123. The immune cell according to embodiment 115 to 117 wherein the level of activation of the immune cell is measured by monitoring the ability of the immune cell to kill target cells.

[0687] 124. The immune cell according to any one of embodiments 115 to 117 wherein the level of activation of the immune cell is determined by monitoring the luciferase activity in reporter cells incorporating inducible NFAT- or NfkB-regulated luciferase expression.

[0688] 125. The immune cell according to any one of embodiments 115 to 117 wherein the level of activation of the immune cell is determined by monitoring the luciferase activity in reporter cells incorporating inducible NFAT- or NfkB-regulated luciferase expression as disclosed in Example 3.

[0689] 126. A polynucleotide comprising a nucleic acid sequence encoding an N-CAR according to any one of embodiments 1 to 96.

[0690] 127. A vector comprising a polynucleotide according to embodiment 124.

The application's sequence listing, which the Patent Office published only in electronic form, follows.

SEQUENCE LISTING (2029 sequences)

SEQ ID NO: 1 - protein, 10 aa, Artificial Sequence
  Synthetic Construct
ELFANKRKYT

SEQ ID NO: 2 - protein, 11 aa, Artificial Sequence
  Synthetic Construct
RKRNNSRLGNG

SEQ ID NO: 3 - protein, 11 aa, Artificial Sequence
  Synthetic Construct
YRHRKKRNGLT

SEQ ID NO: 4 - protein, 22 aa, Artificial Sequence
  Synthetic Construct
YKMYGSEMLHKRDPLDEDEDTD

SEQ ID NO: 5 - protein, 24 aa, Artificial Sequence
  Synthetic Construct
LRKRRDSLSLSTQRTQGPAESARN

SEQ ID NO: 6 - protein, 25 aa, Artificial Sequence
  Synthetic Construct
WRMMKYQQKAAGMSPEQVLQPLEGD

SEQ ID NO: 7 - protein, 29 aa, Artificial Sequence
  Synthetic Construct
CSRAARGTIGARRTGQPLKEDPSAVPVFS

SEQ ID NO: 8 - protein, 32 aa, Artificial Sequence
  Synthetic Construct
RIRQKKAQGSTSSTRLHEPEKNAREITQDTND

SEQ ID NO: 9 - protein, 44 aa, Artificial Sequence
  Synthetic Construct
NNSYQEIEEDADVEWKFARAKLWLSYFDEGRTLPAPFNLVPSPK

SEQ ID NO: 10 - protein, 45 aa, Artificial Sequence
  Synthetic Construct
WLHRRLPPQPIRPLPRFAPLVKTEPQRPVKEEEPKIPGDLDQEPS

SEQ ID NO: 11 - protein, 49 aa, Artificial Sequence
  Synthetic Construct
SNKCDVVVVGGGISGMAAAKLLHDSGLNVVVLEARDRVGGRTYTLRNQK

SEQ ID NO: 12 - protein, 55 aa, Artificial Sequence
  Synthetic Construct
KTHRRKAARTAVGRNDTHPTTGSASPKHQKKSKLHGPTETSSCSGAAPTVEMDEE

SEQ ID NO: 13 - protein, 55 aa, Artificial Sequence
  Synthetic Construct
RVKTRRKKAAQPVQNTDDVNPVMVSGSRGHQHQFQTGIVSDHPAEAGPISEDEQE

SEQ ID NO: 14 - protein, 55 aa, Artificial Sequence
  Synthetic Construct
KARRKQAAGRPEKMDDEDPIMGTITSGSRKKPWPDSPGDQASPPGDAPPLEEQKE

SEQ ID NO: 15 - protein, 57 aa, Artificial Sequence
  Synthetic Construct
KICRKEARKRAAAEQDVPSTLGPISQGHQHECSAGSSQDHPPPGAATYTPGKGEEQE

SEQ ID NO: 16 - protein, 59 aa, Artificial Sequence
  Synthetic Construct
MENQEKASIAGHMFDVVVIGGGISGLSAAKLLTEYGVSVLVLEARDRVGGRTYTIRNEH

SEQ ID NO: 17 - protein, 61 aa, Artificial Sequence
  Synthetic Construct
VRSCRKKSARPAAGVGDTGIEDANAVRGSASQGPLTEPWAEDSPPDQPPPASARSSVGEGE

SEQ ID NO: 18 - protein, 67 aa, Artificial Sequence
  Synthetic Construct
KCYFLRKAKAKQMPVEMSRPAVPLLNSNNEKMSDPNMEANSHYGHNDDVRNHAMKPINDNKEPLNSD

SEQ ID NO: 19 - protein, 70 aa, Artificial Sequence
  Synthetic Construct
VRLRLQKHRPPADPCRGETETMNNLANCQREKDISVSIIGATQIKNTNKKADFHGDHSADKNGFKARYPA

SEQ ID NO: 20 - protein, 76 aa, Artificial Sequence
  Synthetic Construct
RRHQGKQNELSDTAGREINLVDAHLKSEQTEASTRQNSQVLLSETGIYDNDPDLCFRMQEGSEVYSNPCLEENKPG

SEQ ID NO: 21 - protein, 85 aa, Artificial Sequence
  Synthetic Construct
QSVFNKRKSRVRHYLVKCPQNSSGETVTSVTSLAPLQPKKGKRQKEKPDIPPAVPAKAPIAPTFHKPKLLKPQRKVTLPKIAEEN

SEQ ID NO: 22 - protein, 114 aa, Artificial Sequence
  Synthetic Construct
MSDKMSSFLHIGDICSLYAEGSTNGFISTLGLVDDRCVVQPETGDLNNPPKKFRDCLFKLCPMNRYSAQKQFWKAAKPGANSTTDAVLLNKLHHAADLEKKQNETENRKLLGTV

SEQ ID NO: 23 - protein, 114 aa, Artificial Sequence
  Synthetic Construct
MTEKMSSFLYIGDIVSLYAEGSVNGFISTLGLVDDRCVVHPEAGDLANPPKKFRDCLFKVCPMNRYSAQKQYWKAKQAKQGNHTEAALLKKLQHAAELEQKQNESENKKLLGEI

SEQ ID NO: 24 - protein, 115 aa, Artificial Sequence
  Synthetic Construct
MSEMSSFLHIGDIVSLYAEGSVNGFISTLGLVDDRCVVEPAAGDLDNPPKKFRDCLFKVCPMNRYSAQKQYWKAKQTKQDKEKIADVVLLQKLQHAAQMEQKQNDTENKKVHGDV

SEQ ID NO: 25 - protein, 144 aa, Artificial Sequence
  Synthetic Construct
NCVSCCKDPEIDFKEFEDNFDDEIDFTPPAEDTPSVQSPAEVFTLSVPNISLPAPSQFQPSVEGLKSQVARHSLNYIQEIGNGWFGKVLLGEIYTGTSVARVIVKELKASANPKEQDTFLKNGEPYYILQHPNILQCVGQCVEA

SEQ ID NO: 26 - protein, 156 aa, Artificial Sequence
  Synthetic Construct
KRVQETKFGNAFTEEDSELVVNYIAKKSFCRRAIELTLHSLGVSEELQNKLEDVVIDRNLLILGKILGEGEFGSVMEGNLKQEDGTSLKVAVKTMKLDNSSQREIEEFLSEAACMKDFSHPNVIRLLGVCIEMSSQGIPKPMVILPFMKYGDLHTY

SEQ ID NO: 27 - protein, 159 aa, Artificial Sequence
  Synthetic Construct
HRRKKETRYGEVFEPTVERGELVVRYRVRKSYSRRTTEATLNSLGISEELKEKLRDVMVDRHKVALGKTLGEGEFGAVMEGQLNQDDSILKVAVKTMKIAICTRSELEDFLSEAVCMKEFDHPNVMRLIGVCFQGSERESFPAPVVILPFMKHGDLHSF

SEQ ID NO: 28 - protein, 164 aa, Artificial Sequence
  Synthetic Construct
MSGGASATGPRRGPPGLEDTTSKKKQKDRANQESKDGDPRKETGSRYVAQAGLEPLASGDPSASASHAAGITGSRHRTRLFFPSSSGSASTPQEEQTKEGACEDPHDLLATPTPELLLDWRQSAEEVIVKLRVGVGPLQLEDVDAAFTDTDCVVRFAGGQQWGG

SEQ ID NO: 29 - protein, 186 aa, Artificial Sequence
  Synthetic Construct
AYKRKSRESDLTLKRLQMQMDNLESRVALECKEAFAELQTDIHELTSDLDGAGIPFLDYRTYTMRVLFPGIEDHPVLRDLEVPGYRQERVEKGLKLFAQLINNKVFLLSFIRTLESQRSFSMRDRGNVASLIMTVLQSKLEYATDVLKQLLADLIDKNLESKNHPKLLLRRTESVAEKMLTNWFTF

SEQ ID NO: 30 - protein, 196 aa, Artificial Sequence
  Synthetic Construct
YKRKTQDADRTLKRLQLQMDNLESRVALECKEAFAELQTDINELTNHMDEVQIPFLDYRTYAVRVLFPGIEAHPVLKELDTPPNVEKALRLFGQLLHSRAFVLTFIHTLEAQSSFSMRDRGTVASLTMVALQSRLDYATGLLKQLLADLIEKNLESKNHPKLLLRRTESVAEKMLTNWFTFLLHKFLKECAGEPLF

SEQ ID NO: 31 - protein, 197 aa, Artificial Sequence
  Synthetic Construct
RWHCPRRLLGACWTLNGQEEPVSQPTPQLENEVSRQHLPATLPEMVAFYQELHTPTQGQTMVRQLMHKLLVFSAREVDHRGGCLMLQDTGISLLIPPGAVAVGRQERVSLILVWDLSDAPSLSQAQGLVSPVVACGPHGASFLKPCTLTFKHCAEQPSHARTYSSNTTLLDAKVWRPLGRPGAHASRDECRIHLSHF

SEQ ID NO: 32 - protein, 202 aa, Artificial Sequence
  Synthetic Construct
KQKPRYEIRWRVIESISPDGHEYIYVDPMQLPYDSRWEFPRDGLVLGRVLGSGAFGKVVEGTAYGLSRSQPVMKVAVKMLKPTARSSEKQALMSELKIMTHLGPHLNIVNLLGACTKSGPIYIITEYCFYGDLVNYLHKNRDSFLSHHPEKPKKELDIFGLNPADESTRSYVILSFENNGDYMDMKQADTTQYVPMLERKEV

SEQ ID NO: 33 - protein, 252 aa, Artificial Sequence
  Synthetic Construct
MFNYTFQQVQEHTDQIWKFQRHDLIEEYHGRPAAPPPFILLSHLQLFIKRVVLKTPAKRHKQLKNKLEKNEEAALLSWEIYLKENYLQNRQFQQKQRPEQKIEDISNKVDAMVDLLDLDPLKRSGSMEQRLASLEEQVAQTAQALHWIVRTLRASGFSSEADVPTLASQKAAEEPDAEPGGRKKTEEPGDSYHVNARHLLYPNCPVTRFPVPNEKVPWETEFLIYDPPFYTAERKDAAAMDPMGDTLEPLST

SEQ ID NO: 34 - protein, 260 aa, Artificial Sequence
  Synthetic Construct
CCDCGGAPRSAAGFEPVPECSDGAIHSWAVEGPQPEPRDITTVIPQIPPDNANIIECIDNSGVYTNEYGGREMQDLGGGERMTGFELTEGVKTSGMPEICQEYSGTLRRNSMRECREGGLNMNFMESYFCQKAYAYADEDEGRPSNDCLLIYDIEGVGSPAGSVGCCSFIGEDLDDSFLDTLGPKFKKLADISLGKESYPDLDPSWPPQSTEPVCLPQETEPVVSGHPPISPHFGTTTVISESTYPSGPGVLHPKPILDP

SEQ ID NO: 35 - protein, 371 aa, Artificial Sequence
  Synthetic Construct
MADGGEGEDEIQFLRTDDEVVLQCTATIHKEQQKLCLAAEGFGNRLCFLESTSNSKNVPPDLSICTFVLEQSLSVRALQEMLANTVEKSEGQVDVEKWKFMMKTAQGGGHRTLLYGHAILLRHSYSGMYLCCLSTSRSSTDKLAFDVGLQEDTTGEACWWTIHPASKQRSEGEKVRVGDDLILVSVSSERYLHLSYGNGSLHVDAAFQQTLWSVAPISSGSEAAQGYLIGGDVLRLLHGHMDECLTVPSGEHGEEQRRTVHYEGGAVSVHARSLWRLETLRVAWSGSHIRWGQPFRLRHVTTGKYLSLMEDKNLLLMDKEKADVKSTAFTFRSSKEKLDVGVRKEVDGMGTSEIKYGDSVCYIQHVDTGLW

SEQ ID NO: 36 - protein, 519 aa, Artificial Sequence
  Synthetic Construct
MGDAEGEDEVQFLRTDDEVVLQCSATVLKEQLKLCLAAEGFGNRLCFLEPTSNAQNVPPDLAICCFVLEQSLSVRALQEMLANTVEAGVESSQGGGHRTLLYGHAILLRHAHSRMYLSCLTTSRSMTDKLAFDVGLQEDATGEACWWTMHPASKQRSEGEKVRVGDDIILVSVSSERYLHLSTASGELQVDASFMQTLWNMNPICSRCEEGFVTGGHVLRLFHGHMDECLTISPADSDDQRRLVYYEGGAVCTHARSLWRLEPLRISWSGSHLRWGQPLRVRHVTTGQYLALTEDQGLVVVDASKAHTKATSFCFRISKEKLDVAPKRDVEGMGPPEIKYGESLCFVQHVASGLWLTYAAPDPKALRLGVLKKKAMLHQEGHMDDALSLTRCQQEESQAARMIHSTNGLYNQFIKSLDSFSGKPRGSGPPAGTALPIEGVILSLQDLIIYFEPPSEDLQHEEKQSKLRSLRNRQSLFQEEGMLSMVLNCIDRLNVYTTAAHFAEFAGEEAAESWKEIVN

SEQ ID NO: 37 - protein, 41 aa, Artificial Sequence
  Synthetic Construct
AVSLSKMLKKRSPLTTGVYVKMPPTEPECEKQFQPYFIPIN

SEQ ID NO: 38 - protein, 54 aa, Artificial Sequence
  Synthetic Construct
HLWRRQWRPRRFSALEQGIHPPQAQSKIEELEQEPEPEPEPEPEPEPEPEPEQL

SEQ ID NO: 39 - protein, 78 aa, Artificial Sequence
  Synthetic Construct
FKWYSHSKEKIQNLSLISLANLPPSGLANAVAEGIRSEENIYTIEENVYEVEEPNEYYCYVSSRQQPSQPLGCRFAMP

SEQ ID NO: 40 - protein, 101 aa, Artificial Sequence
  Synthetic Construct
HRQNQIKQGPPRSKDEEQKPQQRPDLAVDVLERTADKATVNGLPEKDRETDTSALAAGSSQEVTYAQLDHWALTQRTARAVSPQSTKPMAESITYAAVARH

SEQ ID NO: 41 - protein, 84 aa, Artificial Sequence
  Synthetic Construct
HRWCSNKKNAAVMDQESAGNRTANSEDSDEQDPQEVTYTQLNHCVFTQRKITRPSQRPKTPPTDIIVYAELPNAESRSKVVSCP

SEQ ID NO: 42 - protein, 4 aa, Artificial Sequence
  Synthetic Construct
RRRP

SEQ ID NO: 43 - protein, 4 aa, Artificial Sequence
  Synthetic Construct
MSEE

SEQ ID NO: 44 - protein, 4 aa, Artificial Sequence
  Synthetic Construct
MTSE

SEQ ID NO: 45 - protein, 4 aa, Artificial Sequence
  Synthetic Construct
DRYL

SEQ ID NO: 46 - protein, 4 aa, Artificial Sequence
  Synthetic Construct
MTDS

SEQ ID NO: 47 - protein, 4 aa, Artificial Sequence
  Synthetic Construct
AAKP

SEQ ID NO: 48 - protein, 4 aa, Artificial Sequence
  Synthetic Construct
QHFS

SEQ ID NO: 49 - protein, 4 aa, Artificial Sequence
  Synthetic Construct
MKPK

SEQ ID NO: 50 - protein, 4 aa, Artificial Sequence
  Synthetic Construct
IAAL

SEQ ID NO: 51 - protein, 4 aa, Artificial Sequence
  Synthetic Construct
CLNP

SEQ ID NO: 52 - protein, 4 aa, Artificial Sequence
  Synthetic Construct
QKVL

SEQ ID NO: 53 - protein, 5 aa, Artificial Sequence
  Synthetic Construct
DRYQS

SEQ ID NO: 54 - protein, 5 aa, Artificial Sequence
  Synthetic Construct
LKAKD

SEQ ID NO: 55 - protein, 5 aa, Artificial Sequence
  Synthetic Construct
DRYYA

SEQ ID NO: 56 - protein, 5 aa, Artificial Sequence
  Synthetic Construct
MSYYG

SEQ ID NO: 57 - protein, 5 aa, Artificial Sequence
  Synthetic Construct
SSSKP

SEQ ID NO: 58 - protein, 5 aa, Artificial Sequence
  Synthetic Construct
LKIRH

SEQ ID NO: 59 - protein, 5 aa, Artificial Sequence
  Synthetic Construct
DVRHV

SEQ ID NO: 60 - protein, 5 aa, Artificial Sequence
  Synthetic Construct
DRFYA

SEQ ID NO: 61 - protein, 5 aa, Artificial Sequence
  Synthetic Construct
EGWRI

SEQ ID NO: 62 - protein, 5 aa, Artificial Sequence
  Synthetic Construct
SDIKR

SEQ ID NO: 63 - protein, 6 aa, Artificial Sequence
  Synthetic Construct
LHHKKY

SEQ ID NO: 64 - protein, 6 aa, Artificial Sequence
  Synthetic Construct
TVDRYL

SEQ ID NO: 65 - protein, 6 aa, Artificial Sequence
  Synthetic Construct
SSPTFR

SEQ ID NO: 66 - protein, 6 aa, Artificial Sequence
  Synthetic Construct
WRRAGH

SEQ ID NO: 67 - protein, 6 aa, Artificial Sequence
  Synthetic Construct
YRVDLV

SEQ ID NO: 68 - protein, 6 aa, Artificial Sequence
  Synthetic Construct
NSFDLA

SEQ ID NO: 69 - protein, 6 aa, Artificial Sequence
  Synthetic Construct
YRSGIT

SEQ ID NO: 70 - protein, 6 aa, Artificial Sequence
  Synthetic Construct
YRLGLT

SEQ ID NO: 71 - protein, 6 aa, Artificial Sequence
  Synthetic Construct
QHIMAI

SEQ ID NO: 72 - protein, 6 aa, Artificial Sequence
  Synthetic Construct
NSCANP

SEQ ID NO: 73 - protein, 6 aa, Artificial Sequence
  Synthetic Construct
RRFCAT

SEQ ID NO: 74 - protein, 7 aa, Artificial Sequence
  Synthetic Construct
GDMANNS

SEQ ID NO: 75 - protein, 7 aa, Artificial Sequence
  Synthetic Construct
MAYQSLR

SEQ ID NO: 76 - protein, 7 aa, Artificial Sequence
  Synthetic Construct
TARNLTV

SEQ ID NO: 77 - protein, 7 aa, Artificial Sequence
  Synthetic Construct
MERAEEP

SEQ ID NO: 78 - protein, 7 aa, Artificial Sequence
  Synthetic Construct
SMDRFLA

SEQ ID NO: 79 - protein, 7 aa, Artificial Sequence
  Synthetic Construct
LRLAAAP

SEQ ID NO: 80 - protein, 7 aa, Artificial Sequence
  Synthetic Construct
LRLFAAP

SEQ ID NO: 81 - protein, 7 aa, Artificial Sequence
  Synthetic Construct
KRLIALS

SEQ ID NO: 82 - protein, 8 aa, Artificial Sequence
  Synthetic Construct
YSNSSVNP

SEQ ID NO: 83 - protein, 8 aa, Artificial Sequence
  Synthetic Construct
YANSCVNP

SEQ ID NO: 84 - protein, 8 aa, Artificial Sequence
  Synthetic Construct
KLSPRVKR

SEQ ID NO: 85 - protein, 8 aa, Artificial Sequence
  Synthetic Construct
KIRLRCQS

SEQ ID NO: 86 - protein, 8 aa, Artificial Sequence
  Synthetic Construct
SCDLLTAF

SEQ ID NO: 87 - protein, 8 aa, Artificial Sequence
  Synthetic Construct
MASESSPL

SEQ ID NO: 88 - protein, 8 aa, Artificial Sequence
  Synthetic Construct
KTANEGGS

SEQ ID NO: 89 - protein, 8 aa, Artificial Sequence
  Synthetic Construct
DFAKEGHS

SEQ ID NO: 90 - protein, 8 aa, Artificial Sequence
  Synthetic Construct
DHVRRKDS

SEQ ID NO: 91 - protein, 8 aa, Artificial Sequence
  Synthetic Construct
DNVKKENS

SEQ ID NO: 92 - protein, 8 aa, Artificial Sequence
  Synthetic Construct
VMWKHRYQ

SEQ ID NO: 93 - protein, 8 aa, Artificial Sequence
  Synthetic Construct
KMYYSRRG

SEQ ID NO: 94 - protein, 9 aa, Artificial Sequence
  Synthetic Construct
DRYIAIRIP

SEQ ID NO: 95 - protein, 9 aa, Artificial Sequence
  Synthetic Construct
DRYLAICVP

SEQ ID NO: 96 - protein, 9 aa, Artificial Sequence
  Synthetic Construct
DRYLRVKLT

SEQ ID NO: 97 - protein, 9 aa, Artificial Sequence
  Synthetic Construct
DRYIGVSYP

SEQ ID NO: 98 - protein, 9 aa, Artificial Sequence
  Synthetic Construct
DRYIGVRYS

SEQ ID NO: 99 - protein, 9 aa, Artificial Sequence
  Synthetic Construct
DRYVGVRHS

SEQ ID NO: 100 - protein, 9 aa, Artificial Sequence
  Synthetic Construct
DRYLAVTNP

SEQ ID NO: 101 - protein, 9 aa, Artificial Sequence
  Synthetic Construct
MPFHPVTAA

SEQ ID NO: 102 - protein, 9 aa, Artificial Sequence
  Synthetic Construct
DRYISIHRP

SEQ ID NO: 103 - protein, 9 aa, Artificial Sequence
  Synthetic Construct
MQLKILVSA

SEQ ID NO: 104 - protein, 9 aa, Artificial Sequence
  Synthetic Construct
WKQRRAKEK

SEQ ID NO: 105 - protein, 9 aa, Artificial Sequence
  Synthetic Construct
DRFIAVVHP

SEQ ID NO: 106 - protein, 9 aa, Artificial Sequence
  Synthetic Construct
DRYIAITKP

SEQ ID NO: 107 - protein, 9 aa, Artificial Sequence
  Synthetic Construct
NRYCYICHS

SEQ ID NO: 108 - protein, 9 aa, Artificial Sequence
  Synthetic Construct
DRYLAITKP

SEQ ID NO: 109 - protein, 9 aa, Artificial Sequence
  Synthetic Construct
DRYCAVMDP

SEQ ID NO: 110 - protein, 9 aa, Artificial Sequence
  Synthetic Construct
DRYISIFYA

SEQ ID NO: 111 - protein, 9 aa, Artificial Sequence
  Synthetic Construct
DRYITIFHA

SEQ ID NO: 112 - protein, 9 aa, Artificial Sequence
  Synthetic Construct
NRYCYICHS

SEQ ID NO: 113 - protein, 9 aa, Artificial Sequence
  Synthetic Construct
WKKICNKSS

SEQ ID NO: 114 - protein, 9 aa, Artificial Sequence
  Synthetic Construct
WCYRKRYFV

SEQ ID NO: 115 - protein, 9 aa, Artificial Sequence
  Synthetic Construct
AHSNSCLNP

SEQ ID NO: 116 - protein, 9 aa, Artificial Sequence
  Synthetic Construct
PVFYKLGIT

SEQ ID NO: 117 - protein, 10 aa, Artificial Sequence
  Synthetic Construct
KFHRSRRLLG

SEQ ID NO: 118 - protein, 10 aa, Artificial Sequence
  Synthetic Construct
VDRYLRVKIP

SEQ ID NO: 119 - protein, 10 aa, Artificial Sequence
  Synthetic Construct
FERSCRKENM

SEQ ID NO: 120 - protein, 10 aa, Artificial Sequence
  Synthetic Construct
LPSIYLVFLI

SEQ ID NO: 121 - protein, 10 aa, Artificial Sequence
  Synthetic Construct
SSKTFQTWQS

SEQ ID NO: 122 - protein, 10 aa, Artificial Sequence
  Synthetic Construct
IDRYIAVCHP

SEQ ID NO: 123 - protein, 10 aa, Artificial Sequence
  Synthetic Construct
SFCLRNLFFP

SEQ ID NO: 124 - protein, 10 aa, Artificial Sequence
  Synthetic Construct
LLKTAKEGGS

SEQ ID NO: 125 - protein, 10 aa, Artificial Sequence
  Synthetic Construct
MWRNSKVMNI

SEQ ID NO: 126 - protein, 11 aa, Artificial Sequence
  Synthetic Construct
VEKKLFIHEYI

SEQ ID NO: 127 - protein, 11 aa, Artificial Sequence
  Synthetic Construct
RKRNNSRLGNG

SEQ ID NO: 128 - protein, 11 aa, Artificial Sequence
  Synthetic Construct
QRITVHVTRRP

SEQ ID NO: 129 - protein, 12 aa, Artificial Sequence
  Synthetic Construct
MEAAHAKTTEEC

SEQ ID NO: 130 - protein, 12 aa, Artificial Sequence
  Synthetic Construct
MARISFSYLCPA

SEQ ID NO: 131 - protein, 12 aa, Artificial Sequence
  Synthetic Construct
CCKRQKGKPKRK

SEQ ID NO: 132 - protein, 12 aa, Artificial Sequence
  Synthetic Construct
MTGDKGPQRLSG

SEQ ID NO: 133 - protein, 13 aa, Artificial Sequence
  Synthetic Construct
PDIPQSVKNKVLE

SEQ ID NO: 134 - protein, 13 aa, Artificial Sequence
  Synthetic Construct
KIFKIDIVLWYRD

SEQ ID NO: 135 - protein, 13 aa, Artificial Sequence
  Synthetic Construct
TEYVVRLWSAGCR

SEQ ID NO: 136 - protein, 13 aa, Artificial Sequence
  Synthetic Construct
QSKSELSHYTFYF

SEQ ID NO: 137 - protein, 10 aa, Artificial Sequence
  Synthetic Construct
SIVAYKQVPL

SEQ ID NO: 138 - protein, 13 aa, Artificial Sequence
  Synthetic Construct
SLDFFGSQNTQDD

SEQ ID NO: 139 - protein, 14 aa, Artificial Sequence
  Synthetic Construct
LWLHNGRSCFGVNR

SEQ ID NO: 140 - protein, 14 aa, Artificial Sequence
  Synthetic Construct
RFLRLNLKPDLSDT

SEQ ID NO: 141 - protein, 14 aa, Artificial Sequence
  Synthetic Construct
REHQRSGSYHVREE

SEQ ID NO: 142 - protein, 14 aa, Artificial Sequence
  Synthetic Construct
MITLTELKCLADAQ

SEQ ID NO: 143 - protein, 14 aa, Artificial Sequence
  Synthetic Construct
YNLTRLCRWDKRLL

SEQ ID NO: 144 - protein, 14 aa, Artificial Sequence
  Synthetic Construct
AFMNENFKKNVLSA

SEQ ID NO: 145 - protein, 15 aa, Artificial Sequence
  Synthetic Construct
MIYRLAQAEERQQLE

SEQ ID NO: 146 - protein, 15 aa, Artificial Sequence
  Synthetic Construct
KFRKNFWKLVKDIGC

SEQ ID NO: 147 - protein, 15 aa, Artificial Sequence
  Synthetic Construct
ALALAALAAVEPACG

SEQ ID NO: 148 - protein, 15 aa, Artificial Sequence
  Synthetic Construct
KKIAAATETAAQENA

SEQ ID NO: 149 - protein, 15 aa, Artificial Sequence
  Synthetic Construct
YRKVSKAEEAAQENA

SEQ ID NO: 150 - protein, 15 aa, Artificial Sequence
  Synthetic Construct
LKDFSILLMEGVPKS

SEQ ID NO: 151 - protein, 15 aa, Artificial Sequence
  Synthetic Construct
TVATAVEQYVPSEKL

SEQ ID NO: 152 - protein, 16 aa, Artificial Sequence
  Synthetic Construct
MGRQKELVSRCGEMLH

SEQ ID NO: 153 - protein, 16 aa, Artificial Sequence
  Synthetic Construct
CKRRRGQSPQSSPDLP

SEQ ID NO: 154 - protein, 16 aa, Artificial Sequence
  Synthetic Construct
LLEGVHLFLTARNLTV

SEQ ID NO: 155 - protein, 16 aa, Artificial Sequence
  Synthetic Construct
EERERKHHLKHGPNAP

SEQ ID NO: 156 - protein, 16 aa, Artificial Sequence
  Synthetic Construct
PLTHRLLCSEEPPRLH

SEQ ID NO: 157 - protein, 16 aa, Artificial Sequence
  Synthetic Construct
LYLLVRKHINRAHTAL

SEQ ID NO: 158 - protein, 16 aa, Artificial Sequence
  Synthetic Construct
KLPLWGQPSDQNCYDD

SEQ ID NO: 159 - protein, 17 aa, Artificial Sequence
  Synthetic Construct
MYRLKVLQMRLRSAITG

SEQ ID NO: 160 - protein, 17 aa, Artificial Sequence
  Synthetic Construct
SMRGTICNPGPRKSMSK

SEQ ID NO: 161 - protein, 17 aa, Artificial Sequence
  Synthetic Construct
RILVRKLEPAQGSLHTQ

SEQ ID NO: 162 - protein, 16 aa, Artificial Sequence
  Synthetic Construct
SRYATLMQKDSSQETT

SEQ ID NO: 163 - protein, 17 aa, Artificial Sequence
  Synthetic Construct
SSHFGCQLVCCQSSNVS

SEQ ID NO: 164 - protein, 17 aa, Artificial Sequence
  Synthetic Construct
RILMRKLRTQETRGNEV

SEQ ID NO: 165 - protein, 17 aa, Artificial Sequence
  Synthetic Construct
RILLQKLRPPDIRKSDS

SEQ ID NO: 166 - protein, 17 aa, Artificial Sequence
  Synthetic Construct
RILLQKLTSPDVGGNDQ

SEQ ID NO: 167 - protein, 18 aa, Artificial Sequence
  Synthetic Construct
RSVRPCFTQAAFLKSKYW

SEQ ID NO: 168 - protein, 18 aa, Artificial Sequence
  Synthetic Construct
RSGRGRKLSGDQITLPTT

SEQ ID NO: 169 - protein, 18 aa, Artificial Sequence
  Synthetic Construct
MAAENEASQESALGAYSP

SEQ ID NO: 170 - protein, 18 aa, Artificial Sequence
  Synthetic Construct
TAHVFSCLSLRLRAAFFY

SEQ ID NO: 171 - protein, 19 aa, Artificial Sequence
  Synthetic Construct
NPFIYSRNSAGLRRKVLWC

SEQ ID NO: 172 - protein, 20 aa, Artificial Sequence
  Synthetic Construct
NNESSNNPSSIASFLSSITY

SEQ ID NO: 173 - protein, 20 aa, Artificial Sequence
  Synthetic Construct
TPQLFINYKLKSVAHLPWRM

SEQ ID NO: 174 - protein, 20 aa, Artificial Sequence
  Synthetic Construct
WRLKPSADCGPFRGLPLFIH

SEQ ID NO: 175 - protein, 21 aa, Artificial Sequence
  Synthetic Construct
NIPLLFYHLWRYFHRPADGSE

SEQ ID NO: 176 - protein, 21 aa, Artificial Sequence
  Synthetic Construct
SQVTKSSPEQSYQGDMYPTRG

SEQ ID NO: 177 - protein, 21 aa, Artificial Sequence
  Synthetic Construct
CCSALQKRCRKCFNKDSTEAT

SEQ ID NO: 178 - protein, 21 aa, Artificial Sequence
  Synthetic Construct
CQRLAARLGVVTGKDLGEVCH

SEQ ID NO: 179 - protein, 21 aa, Artificial Sequence
  Synthetic Construct
QVFRNISGKQSSLPAMSKVRR

SEQ ID NO: 180 - protein, 22 aa, Artificial Sequence
  Synthetic Construct
GGRREGESWNWAWVLSTRLARH

SEQ ID NO: 181 - protein, 22 aa, Artificial Sequence
  Synthetic Construct
YKMYGSEMLHKRDPLDEDEDTD

SEQ ID NO: 182 - protein, 23 aa, Artificial Sequence
  Synthetic Construct
HMYRERGGELLVHTGFLGSSQDR

SEQ ID NO: 183 - protein, 23 aa, Artificial Sequence
  Synthetic Construct
RKWCQYQKEIMERPPPFKPPPPP

SEQ ID NO: 184 - protein, 23 aa, Artificial Sequence
  Synthetic Construct
HNKRKIFLLVQSRKWRDGLCSKT

SEQ ID NO: 185 - protein, 23 aa, Artificial Sequence
  Synthetic Construct
RAARRRPEHLDTPDTPPRSQAQE

SEQ ID NO: 186 - protein, 23 aa, Artificial Sequence
  Synthetic Construct
NGTCFTAGRLIYVAGREGHMLKV

SEQ ID NO: 187 - protein, 24 aa, Artificial Sequence
  Synthetic Construct
DANYEMPGETLKVRYWPRDSWPVG

SEQ ID NO: 188 - protein, 15 aa, Artificial Sequence
  Synthetic Construct
ARSQMARNIWYFVVS

SEQ ID NO: 189 - protein, 24 aa, Artificial Sequence
  Synthetic Construct
LRKRRDSLSLSTQRTQGPAESARN

SEQ ID NO: 190 - protein, 25 aa, Artificial Sequence
  Synthetic Construct
DAASEIPEQGPVIKFWPNEKWAFIG

SEQ ID NO: 191 - protein, 25 aa, Artificial Sequence
  Synthetic Construct
WGYKNYREQRQLPQGDYVKKPGDGD

SEQ ID NO: 192 - protein, 23 aa, Artificial Sequence
  Synthetic Construct
TSYYSFVSHLRKIRTCTSIMEKD

SEQ ID NO: 193 - protein, 19 aa, Artificial Sequence
  Synthetic Construct
LIVRALIYKDLDNSPLRRK

SEQ ID NO: 194 - protein, 24 aa, Artificial Sequence
  Synthetic Construct
DHWALTQRTARAVSPQSTKPMAES

SEQ ID NO: 195 - protein, 25 aa, Artificial Sequence
  Synthetic Construct
HHNKRKIIAFVLEGKRSKVTRRPKA

SEQ ID NO: 196 - protein, 26 aa, Artificial Sequence
  Synthetic Construct
EWKSPFGLTPKGRNRSKVFSFSSALN

SEQ ID NO: 197 - protein, 27 aa, Artificial Sequence
  Synthetic Construct
YFLGRLVPRGRGAAEAATRKQRITETE

SEQ ID NO: 198 - protein, 28 aa, Artificial Sequence
  Synthetic Construct
QATACRTCHRQQQPAACRGFARVARTIL

SEQ ID NO: 199 - protein, 28 aa, Artificial Sequence
  Synthetic Construct
NKFSKYYQKQKDIDVDQCSEDAPEKCHE

SEQ ID NO: 200 - protein, 28 aa, Artificial Sequence
  Synthetic Construct
SKCSREVLWHCHLCPSSTEHASASANGH

SEQ ID NO: 201 - protein, 28 aa, Artificial Sequence
  Synthetic Construct
DMGSSDGETTHDSQITQEAVPKSLGASE

SEQ ID NO: 202 - protein, 29 aa, Artificial Sequence
  Synthetic Construct
CSRAARGTIGARRTGQPLKEDPSAVPVFS

SEQ ID NO: 203 - protein, 30 aa, Artificial Sequence
  Synthetic Construct
SVQKLSEFLSSAEIREEQCAPHEPTPQGPA

SEQ ID NO: 204 - protein, 30 aa, Artificial Sequence
  Synthetic Construct
KCYKIEIMLFYRNHFGAEELDGDNKDYDAY

SEQ ID NO: 205 - protein, 30 aa, Artificial Sequence
  Synthetic Construct
KCYNIELMLFYRQHFGADETNDDNKEYDAY

SEQ ID NO: 206 - protein, 30 aa, Artificial Sequence
  Synthetic Construct
GWKLRSYKTLFDAAETMVSLQLGIFNYEEV

SEQ ID NO: 207 - protein, 30 aa, Artificial Sequence
  Synthetic Construct
SSFSSCKDVTAEENNEAKNLQLAVARIKKG

SEQ ID NO: 208 - protein, 30 aa, Artificial Sequence
  Synthetic Construct
MRTKAAGCAERRPLQPRTEAAAAPAGRAMP

SEQ ID NO: 209 - protein, 31 aa, Artificial Sequence
  Synthetic Construct
RKRWQNEKLGLDAGDEYEDENLYEGLNLDDC

SEQ ID NO: 210 - protein, 31 aa, Artificial Sequence
  Synthetic Construct
MASHEVDNAELGSASAHGTPGSEAGPEELNT

SEQ ID NO: 211 - protein, 31 aa, Artificial Sequence
  Synthetic Construct
NGHPTSNAALFFIERRPHHWPAMKFRSHPDH

SEQ ID NO: 212 - protein, 32 aa, Artificial Sequence
  Synthetic Construct
ALLNNIIEIRLDAKKFVTELRRPVAVRAKDIG

SEQ ID NO: 213 - protein, 32 aa, Artificial Sequence
  Synthetic Construct
PETKGQSLAEIDQQFQKRRFTLSFGHRQNSTG

SEQ ID NO: 214 - protein, 32 aa, Artificial Sequence
  Synthetic Construct
PETKGKKLEEIESLFDNRLCTCGTSDSDEGRY

SEQ ID NO: 215 - protein, 32 aa, Artificial Sequence
  Synthetic Construct
YNLMSQKFRAAFRKLCNCKQKPTEKPANYSVA

SEQ ID NO: 216 - protein, 33 aa, Artificial Sequence
  Synthetic Construct
NYIFFGRGPQRQKKAAEKAASANNEKMRLDVNK

SEQ ID NO: 217 - protein, 33 aa, Artificial Sequence
  Synthetic Construct
DLNESANSTAQYASNAWFAAASSEPEEGISVFE

SEQ ID NO: 218 - protein, 33 aa, Artificial Sequence; identical to SEQ ID NO: 217
  Synthetic Construct

SEQ ID NO: 219 - protein, 34 aa, Artificial Sequence
  Synthetic Construct
SYQQKKFCFSIQQGLNADYVKGENLEAVVCEEPQ

SEQ ID NO: 220 - protein, 34 aa, Artificial Sequence
  Synthetic Construct
MDGSGERSLPEPGSQSSAASDDIEIVVNVGGVRQ

SEQ ID NO: 221 - protein, 34 aa, Artificial Sequence
  Synthetic Construct
RWCSKKKDAAVMNQEPAGHRTVNREDSDEQDPQE

SEQ ID NO: 222 - protein, 35 aa, Artificial Sequence
  Synthetic Construct
MFCSEKKLREVERIVKANDREYNEKFQYADNRIHT

SEQ ID NO: 223 - protein, 35 aa, Artificial Sequence
  Synthetic Construct
TQFSETKQRESQLMREQRVRFLSNASTLASFSEPG

SEQ ID NO: 224 - protein, 35 aa, Artificial Sequence
  Synthetic Construct
NWLNPPRLQMGSMTSTTLYNSMWFVYGSFVQQGGE

SEQ ID NO: 225 - protein, 35 aa, Artificial Sequence
  Synthetic Construct
CFYIKKINPLKEKSIILPKSLISVVRSATLETKPE

SEQ ID NO: 226 - protein, 35 aa, Artificial Sequence
  Synthetic Construct
HRWCANKKNAVVMDQEPAGNRTVNREDSDEQDPQE

SEQ ID NO: 227 - protein, 36 aa, Artificial Sequence
  Synthetic Construct
NYYSSCRKPTTTKKTTSLLHPDSSRWIPERISLQAP

SEQ ID NO: 228 - protein, 36 aa, Artificial Sequence
  Synthetic Construct
HLTALFLTVYEWRSPYGLTPRGRNRSTVFSYSSALN

SEQ ID NO: 229 - protein, 36 aa, Artificial Sequence
  Synthetic Construct
YFFIRTLQAHHDRSERESPFSGSSRQPDSLSSIENA

SEQ ID NO: 230 - protein, 36 aa, Artificial Sequence
  Synthetic Construct
LHCCCSNKKNAAVMDQEPAGDRTVNREDSDDQDPQE

SEQ ID NO: 231 - protein, 36 aa, Artificial Sequence
  Synthetic Construct
HYLRFQRKSIDGSFGSNDGSGNMVASHPIAASTPEG

SEQ ID NO: 232 - protein, 37 aa, Artificial Sequence
  Synthetic Construct
RWWNQYENLPWPDRLMSLVSGFVEGKDEQGRLLRRTL

SEQ ID NO: 233 - protein, 37 aa, Artificial Sequence
  Synthetic Construct
DVDVDDTTEEQGYGMAYTVHKWSELSWASHWVTFGCW

SEQ ID NO: 234 - protein, 38 aa, Artificial Sequence
  Synthetic Construct
RYCWLRRQAALQRRLSAMEKGKLHKPGKDASKRGRQTP

SEQ ID NO: 235 - protein, 38 aa, Artificial Sequence
  Synthetic Construct
MKKAEMGRFSISPDEDSSSYSSNSDFNYSYPTKQAALK

SEQ ID NO: 236 - protein, 39 aa, Artificial Sequence
  Synthetic Construct
LKCLIVALPKIILAVKSKGKFYLVIEELSQLFRSLVPIQ

SEQ ID NO: 237 - protein, 39 aa, Artificial Sequence
  Synthetic Construct
ETLLNAPRAMGTSSSPPSPASVVAPGTTLFEESRLPVFT

SEQ ID NO: 238 - protein, 40 aa, Artificial Sequence
  Synthetic Construct
YVRSWRKAGPLPSQIPPTAPGGEQCPLYANVHHQKGKDEG

SEQ ID NO: 239 - protein, 40 aa, Artificial Sequence
  Synthetic Construct
TYLSEPLVRGYTTAAAVQVFVSQLKYVFGLHLSSHSGPLS

SEQ ID NO: 240 - protein, 37 aa, Artificial Sequence
  Synthetic Construct
RWWSQYTSIPLPDQLMCVISASVHGVDQRGRLLRRTL

SEQ ID NO: 241 - protein, 41 aa, Artificial Sequence
  Synthetic Construct
RRFRQACLETCARCCPRPPRARPRALPDEDPPTPSIASLSR

SEQ ID NO: 242 - protein, 36 aa, Artificial Sequence
  Synthetic Construct
MAEAITYADLRFVKAPLKKSISSRLGQDPGADDDGE

SEQ ID NO: 243 - protein, 41 aa, Artificial Sequence
  Synthetic Construct
MQTSEREGSGPELSPSVMPEAPLESPPFPTKSPAFDLFNLV

SEQ ID NO: 244 - protein, 42 aa, Artificial Sequence
  Synthetic Construct
SKEKQFRGLQSRIEQEQKFTVIRGGQVIQIPVADITVGDIAQ

SEQ ID NO: 245 - protein, 42 aa, Artificial Sequence
  Synthetic Construct
SKEKQFRGLQSRIEQEQKFTVVRAGQVVQIPVAEIVVGDIAQ

SEQ ID NO: 246 - protein, 42 aa, Artificial Sequence
  Synthetic Construct
SKEKQFRGLQCRIEQEQKFSIIRNGQLIQLPVAEIVVGDIAQ

SEQ ID NO: 247 - protein, 42 aa, Artificial Sequence
  Synthetic Construct
KCLQGNADGDGGGGQCCRRQDSPSPDFYKQSSPNLQVSSDGT

SEQ ID NO: 248 - protein, 43 aa, Artificial Sequence
  Synthetic Construct
SSECQRYVYSILCCKESSDPSSYNSSGQLMASKMDTCSSNLNN

SEQ ID NO: 249 - protein, 37 aa, Artificial Sequence
  Synthetic Construct
MDNQGVIYSDLNLPPNPKRQQRKPKGNKNSILATEQE

SEQ ID NO: 250 - protein, 43 aa, Artificial Sequence
  Synthetic Construct
WWGDIWWKTMMELRSLDTQKATCHLQQVTDLPWTSVSSPVERE

SEQ ID NO: 251 - protein, 43 aa, Artificial Sequence
  Synthetic Construct
RLLFSKTYKLQERSDLTVKEKEELIEEWQPEPLVPPVPKDHPA

SEQ ID NO: 252 - protein, 44 aa, Artificial Sequence
  Synthetic Construct
KYYPINMDFKPNFITTYKCECVAPDTVNTTVFNASAPLAPDTNA

SEQ ID NO: 253 - protein, 44 aa, Artificial Sequence
  Synthetic Construct
CIRRSCLHRRRTFTYQSGSGEETILQFSSGTLTLTRRPKLQPEP

SEQ ID NO: 254 - protein, 45 aa, Artificial Sequence
  Synthetic Construct
MTNPSDRVLPANSMAESREGDFGCTVMELRKLMELRSRDALTQIN

SEQ ID NO: 255 - protein, 45 aa, Artificial Sequence; identical to SEQ ID NO: 10
  Synthetic Construct

SEQ ID NO: 256 - protein, 45 aa, Artificial Sequence
  Synthetic Construct
WCQCCPHTCCCYVRCPCCPDKCCCPEALYAAGKAATSGVPSIYAP

SEQ ID NO: 257 - protein, 45 aa, Artificial Sequence
  Synthetic Construct
AVCQCRRKNYGQLDIFPARDTYHPMSEYPTYHTHGRYVPPSSTDR

SEQ ID NO: 258 - protein, 46 aa, Artificial Sequence
  Synthetic Construct
TVVLRVQFPSWNGLGSIPSTDIYKSTKNYKNIEEPQGVKILRFSSP

SEQ ID NO: 259 - protein, 47 aa, Artificial Sequence
  Synthetic Construct
DNTVPGSPEERGLIQWKAGAHANSDMSSSLKSYDFPIGMGIVKRITF

SEQ ID NO: 260 - protein, 47 aa, Artificial Sequence
  Synthetic Construct
YRCSQHSSSSEESTKRTSHSKLPEQEAAEADLSNMERVSLSTADPQG

SEQ ID NO: 261 - protein, 48 aa, Artificial Sequence
  Synthetic Construct
GLKGIRSALKRPVEQPLGEIPEKSLHSIAVSSIQKAKGYQLLEEEKIV

SEQ ID NO: 262 - protein, 48 aa, Artificial Sequence
  Synthetic Construct
RWRRRKGQQRTKATTPAREPFQNTEEPYENIRNEGQNTDPKLNPKDDG

SEQ ID NO: 263 - protein, 49 aa, Artificial Sequence
  Synthetic Construct
RFTGHPGAYLRLINRWRLEECHPSGCLIDLCMQMGIIMVLKQTWNNFME

SEQ ID NO: 264 - protein, 49 aa, Artificial Sequence
  Synthetic Construct
VVALIYCRKKRISALPGYPECREMGETLPEKPANPTNPDEADKVGAENT

SEQ ID NO: 265 - protein, 49 aa, Artificial Sequence
  Synthetic Construct
SYRYVTKPPAPPNSLNVQRVLTFQPLRFIQEHVLIPVFDLSGPSSLAQP

SEQ ID NO: 266 - protein, 49 aa, Artificial Sequence; identical to SEQ ID NO: 11
  Synthetic Construct

SEQ ID NO: 267 - protein, 49 aa, Artificial Sequence
  Synthetic Construct
TLRNATQQKDMVEVADFDFSPMSDKNPEPPSGVRCCCQMCCGPFLLETP

SEQ ID NO: 268 - protein, 62 aa, Artificial Sequence
  Synthetic Construct
HRQNQIKQGPPRSKDEEQKPQQRPDLAVDVLERTADKATVNGLPEKDRETDTSALAAGSSQE

SEQ ID NO: 269 - protein, 50 aa, Artificial Sequence
  Synthetic Construct
MDEEEDGAGAEESGQPRSFMRLNDLSGAGGRPGPGSAEKDPGSADSEAEG

SEQ ID NO: 270 - protein, 50 aa, Artificial Sequence
  Synthetic Construct
EMLHLGFGTIRDSLNSKRRELEDPGAYNYPFTWNTPSAPPGYNIAVKPDQ

SEQ ID NO: 271 - protein, 51 aa, Artificial Sequence
  Synthetic Construct
AKTGRTSIQRDLKEQQPQALAPGRGPSHSSAFSMSPLSTAQAPLPNPRTAA

SEQ ID NO: 272 - protein, 51 aa, Artificial Sequence
  Synthetic Construct
LCLRKQSNGREAEYSDKHGQYLIGHGTKVYIDPFTYEDPNEAVREFAKEID

SEQ ID NO: 273 - protein, 51 aa, Artificial Sequence
  Synthetic Construct
KNFRRDFFILLSKCGCYEMQAQIYRTETSSTVHNTHPRNGHCSSAPRVTNG

SEQ ID NO: 274 - protein, 51 aa, Artificial Sequence
  Synthetic Construct
QDIGYFLKVAAVGRRVRSYGKRRPARTILRAFLEKARQTPHKPFLLFRDET

SEQ ID NO: 275 - protein, 54 aa, Artificial Sequence
  Synthetic Construct
MSAARPQFSIDDAFELSLEDGGPGPESSGVARFGPLHFERRARFEVADEDKQSR

SEQ ID NO: 276 - protein, 55 aa, Artificial Sequence
  Synthetic Construct
YAATSRQLKRLESVSRSPIYSHFSETVTGASVIRAYNRSRDFEIISDTKVDANQR

SEQ ID NO: 277 - protein, 55 aa, Artificial Sequence
  Synthetic Construct
MTVPKEMPEKWARAQAPPSWSRKKPSWGTEEERRARANDREYNEKFQYASNCIKT

SEQ ID NO: 278 - protein, 55 aa, Artificial Sequence; identical to SEQ ID NO: 12
  Synthetic Construct

SEQ ID NO: 279 - protein, 55 aa, Artificial Sequence; identical to SEQ ID NO: 14
  Synthetic Construct

SEQ ID NO: 280 - protein, 55 aa, Artificial Sequence; identical to SEQ ID NO: 13
  Synthetic Construct

SEQ ID NO: 281 - protein, 56 aa, Artificial Sequence
  Synthetic Construct
MKFEEKCGDNGSIVGRNQSYPGEKHQPKGKPIANGEAEVYAKQEANGKCSTPRKSL

SEQ ID NO: 282 - protein, 56 aa, Artificial Sequence
  Synthetic Construct
DIKINQYIIKKCSPCCACLAKAMERSEQQPLMGWEDEGQPFIRRQSRTDSGIFYED

SEQ ID NO: 283 - protein, 56 aa, Artificial Sequence
  Synthetic Construct
MAEPQAESEPLLGGARGGGGDWPAGLTTYRSIQVGPGAAARWDLCIDQAVVFIEDA

SEQ ID NO: 284 - protein, 57 aa, Artificial Sequence
  Synthetic Construct
AVTISLAYSVKKMMKDNNLVRHLDACETMGNATAICSDKTGTLTTNRMTVVQAYVGD

SEQ ID NO: 285 - protein, 57 aa, Artificial Sequence
  Synthetic Construct
AVTISLAYSVKKMMKDNNLVRHLDACETMGNATAICSDKTGTLTMNRMTVVQAYIGG

SEQ ID NO: 286 - protein, 57 aa, Artificial Sequence
  Synthetic Construct
SNMKSRSAGKLWELQHEIEVYRKTVIAQWRALDLDVVLTPMLAPALDLNAPGRATGA

SEQ ID NO: 287 - protein, 57 aa, Artificial Sequence
  Synthetic Construct
HPELNVQKRKRSFKAVVTAATMSSRLSHKPSDRPNGEAKTELCENVDPNSPAAKKKY

SEQ ID NO: 288 - protein, 57 aa, Artificial Sequence
  Synthetic Construct
RKSNFIFDKLHKVGIKTRRQWRRSQFCDINILAMFCNENRDHIKSLNRLDFITNESD

SEQ ID NO: 289 - protein, 57 aa, Artificial Sequence; identical to SEQ ID NO: 15
  Synthetic Construct

SEQ ID NO: 290 - protein, 58 aa, Artificial Sequence
  Synthetic Construct
SGKTLESWRSLCTRCCWASKGAAVGGGAGATAAGGGGGPGGGGGGGPGGGGGPGGGGG

SEQ ID NO: 291 - protein, 58 aa, Artificial Sequence
  Synthetic Construct
RSCRKKSARPAADVGDIGMKDANTIRGSASQGNLTESWADDNPRHHGLAAHSSGEERE

SEQ ID NO: 292 - protein, 58 aa, Artificial Sequence
  Synthetic Construct
MKSKMRQALGFAKEARESPDTQALLTCAEKEEENQENLDWVPLTTLSHCKSLRTMTAI

SEQ ID NO: 293 - protein, 58 aa, Artificial Sequence
  Synthetic Construct
AILFAVVARGTTILAKHAWCGGNFLEVTEQILAKIPSENNKLTYSHGNYLFHYICQDR

SEQ ID NO: 294 - protein, 59 aa, Artificial Sequence
  Synthetic Construct
MDHAEENEILAATQRYYVERPIFSHPVLQERLHTKDKVPDSIADKLKQAFTCTPKKIRN

SEQ ID NO: 295 - protein, 60 aa, Artificial Sequence
  Synthetic Construct
KKLVKKFRQKKQRQWIGPTGMNQNMSFHRNHTATVRSHAENPTASHVDNEYSQPPRNSHL

SEQ ID NO: 296 - protein, 60 aa, Artificial Sequence
  Synthetic Construct
MPRRLQPRGAGTKGPPAPAPAASGAARNSHSAASRDPPASAKPLLRWDEVPDDFVECFIL

SEQ ID NO: 297 - protein, 60 aa, Artificial Sequence
  Synthetic Construct
RSCRKKSARPAVGVGDTGMEDANAVRGSASQGPLIESPADDSPPHHAPPALATPSPEEGE

SEQ ID NO: 298 - protein, 61 aa, Artificial Sequence
  Synthetic Construct
DNFEYLTRDSSILGPHHLDEFIRVWAEYDPAACGRISYNDMFEMLKHMSPPLGLGKKCPAR

SEQ ID NO: 299 - protein, 61 aa, Artificial Sequence
  Synthetic Construct
SKRWTHLPCGCIINCRQNAYAVASDGKKIKRKGFEFNLSFQKSYGIYKIAHEDYYDDDENS

SEQ ID NO: 300 - protein, 45 aa, Artificial Sequence
  Synthetic Construct
NFNYFYHRETEGEEQSQYMHVGSCQHLSSSAEELRKARSNSTLSK

SEQ ID NO: 301 - protein, 61 aa, Artificial Sequence; identical to SEQ ID NO: 17
  Synthetic Construct

SEQ ID NO: 302 - protein, 63 aa, Artificial Sequence
  Synthetic Construct
LKLANEETIKNITHWTLFNYYNSSGWNESVPRPPLHPADVPRGSCWETAVGIEFMRLTVSDML

SEQ ID NO: 303 - protein, 64 aa, Artificial Sequence
  Synthetic Construct
MCHSRSCHPTMTILQAPTPAPSTIPGPRRGSGPEIFTFDPLPEPAAAPAGRPSASRGHRKRSRR

SEQ ID NO: 304 - protein, 64 aa, Artificial Sequence
  Synthetic Construct
ASSAASSEHFEKLHEIFRGLHEDLQGVPERLLGTAGTEEKKKLIRDFDEKQQEANETLAEMEEE

SEQ ID NO: 305 - protein, 66 aa, Artificial Sequence
  Synthetic Construct
MADQIPLYPVRSAAAAAANRKRAAYYSAAGPRPGADRHSRYQLEDESAHLDEMPLMMSEEGFENEE

SEQ ID NO: 306 - protein, 66 aa, Artificial Sequence
  Synthetic Construct
SMILSASVIRVRDGLPLSASTDYEQSTGMQECRKYFKMLSRKLAQLPDRCTLKTGHYNINFISSLG

SEQ ID NO: 307 - protein, 66 aa, Artificial Sequence
  Synthetic Construct
LTRKKKALRIHSVEGDLRRKSAGQEEWSPSAPSPPGSCVQAEAAPAGLCGEQRGEDCAELHDYFNV

SEQ ID NO: 308 - protein, 67 aa, Artificial Sequence
  Synthetic Construct
TIPTSRLKFLKEAGRLTQKEEIPEEELNEDVEEIDHAERELRRGQILWFRGLNRIQTQIRVVKAFRS

SEQ ID NO: 309 - protein, 67 aa, Artificial Sequence
  Synthetic Construct
TIPTSQLKCLKEAGHGPGKDEMTDEELAEGEEEIDHAERELRRGQILWFRGLNRIQTQIRVVKAFRS

SEQ ID NO: 310 - protein, 67 aa, Artificial Sequence; identical to SEQ ID NO: 18
  Synthetic Construct

SEQ ID NO: 311 - protein, 67 aa, Artificial Sequence
  Synthetic Construct
MGDTHWRVAQERDELWRAQVVATTVMLERKLPRCLWPRSGICGCEFGLGDRWFLRVENHNDQNPLRV

SEQ ID NO: 312 - protein, 68 aa, Artificial Sequence
  Synthetic Construct
YSPGDYICKKGDIGREMYIIKEGKLAVVADDGVTQFVVLSDGSYFGEISILNIKGSKAGNRRTANIKS

SEQ ID NO: 313 - protein, 68 aa, Artificial Sequence
  Synthetic Construct
FSPGDYICRKGDIGKEMYIIKEGKLAVVADDGVTQYALLSAGSCFGEISILNIKGSKMGNRRTANIRS

SEQ ID NO: 314 - protein, 68 aa, Artificial Sequence
  Synthetic Construct
CLKIIKEYERAVVFRLGRIQADKAKGPGLILVLPCIDVFVKVDLRTVTCNIPPQEILTRDSVTTQVDG

SEQ ID NO: 315 - protein, 69 aa, Artificial Sequence
  Synthetic Construct
MTEGARAADEVRVPLGAPPPGPAALVGASPESPGAPGREAERGSELGVSPSESPAAERGAELGADEEQR

SEQ ID NO: 316 - protein, 70 aa, Artificial Sequence; identical to SEQ ID NO: 19
  Synthetic Construct

SEQ ID NO: 317 - protein, 73 aa, Artificial Sequence
  Synthetic Construct
VITTCLALGTRRMAKKNAIVRSLPSVETLGCTSVICSDKTGTLTTNQMSVCRMFILDRVEGDTCSLNEFTITG

SEQ ID NO: 318 - protein, 73 aa, Artificial Sequence
  Synthetic Construct
MEAVLNELVSVEDLLKFEKKFQSEKAAGSVSKSTQFEYAWCLVRSKYNDDIRKGIVLLEELLPKGSKEEQRDY

SEQ ID NO: 319 - protein, 75 aa, Artificial Sequence
  Synthetic Construct
TRPKPLKPPCDLSMQSVEVAGSGGARRSALLDSDEPLVYFYDDVTTLYEGFQRGIQVSNNGPCLGSRKPDQPYEW

SEQ ID NO: 320 - protein, 75 aa, Artificial Sequence
  Synthetic Construct
HRPKALQPPCNLLMQSEEVEDSGGARRSVIGSGPQLLTHYYDDARTMYQVFRRGLSISGNGPCLGFRKPKQPYQW

SEQ ID NO: 321 - protein, 76 aa, Artificial Sequence; identical to SEQ ID NO: 20
  Synthetic Construct

SEQ ID NO: 322 - protein, 76 aa, Artificial Sequence
  Synthetic Construct
WSCERYRADVRTVWEQCVAIMSEEDGDDDGGCDDYAEGRVCKVRFDANGATGPGSRDPAQVKLLPGRHMLFPPLER

SEQ ID NO: 323 - protein, 73 aa, Artificial Sequence
  Synthetic Construct
GPLVRYLDVKKTNKKESINEELHIRLMDHLKAGIEDVCGHWSHYQVRDKFKKFDHRYLRKILIRKNLPKSSIV

SEQ ID NO: 324 - protein, 79 aa, Artificial Sequence
  Synthetic Construct
KYPTLLHQRKKQRFLSKHISHRGGAGENLENTMAAFQHAVKIGTDMLELDCHITKDEQVVVSHDENLKRATGVNVNISD

SEQ ID NO: 325 - protein, 79 aa, Artificial Sequence
  Synthetic Construct
AHDHYTVDVVVAYYITTRLFWWYHTMANQQVLKEASQMNLLARVWWYRPFQYFEKNVQGIVPRSYHWPFPWPVVHLSRQ

SEQ ID NO: 326 - protein, 79 aa, Artificial Sequence
  Synthetic Construct
SKASRAPRAHRDINVPRALVDILRHQAGPGTRPDRARSSSLTPGIGGPDSMPPRTPKNLYNTVKTPNLDWRALPPPSPS

SEQ ID NO: 327 - protein, 80 aa, Artificial Sequence
  Synthetic Construct
FKVYKWKQSRDLYRAPVSSLYRTPGPSLHADAVRGGLMSPHLYHQVYLTTDSRRSDPLLKKPGAASPLASRQNTLRSCDP

SEQ ID NO: 328 - protein, 81 aa, Artificial Sequence
  Synthetic Construct
MLCRKTSQQEHVYEAARAHAREANDSGETMRVAIFASGCSSDEPTSQNLGNNYSDEPCIGQEYQIIAQINGNYARLLDTVP

SEQ ID NO: 329 - protein, 82 aa, Artificial Sequence
  Synthetic Construct
KQKNEHHHGHSHYASESLPSKKDQEEGVMEKLQNGDLDHMIPQHCSSELDGKAPMVDEKVIVGSLSVQDLQASQSACYWLKG

SEQ ID NO: 330 - protein, 83 aa, Artificial Sequence
  Synthetic Construct
HKALMERALRATFREALSSLHSRRRLDTEKKHQEHLLLSILPAYLAREMKAEIMARLQAGQGSRPESTNNFHSLYVKRHQGVS

SEQ ID NO: 331 - protein, 83 aa, Artificial Sequence
  Synthetic Construct
HKHQMQDASRDLFTYTVKCIQIRRKLRIEKRQQENLLLSVLPAHISMGMKLAIIERLKEHGDRRCMPDNNFHSLYVKRHQNVS

SEQ ID NO: 332 - protein, 84 aa, Artificial Sequence
  Synthetic Construct
ERFVAKPCAIALNIQANGPQIAPPNAILEKVFTAITKHPDEKRLEGLSKQLDWDVRSIQRWFRQRRNQEKPSTLTRFCESMWRF

SEQ ID NO: 333 - protein, 84 aa, Artificial Sequence
  Synthetic Construct
AWRLWRCRVARSRELNKPWAAQDGPKPGLGLQPRYGSRSAPKPQVAVPSCPSTPDYENMFVGQPAAEHQWDEQGAHPSEDNDFY

SEQ ID NO: 334 - protein, 84 aa, Artificial Sequence
  Synthetic Construct
HLSQWTRGRSRSHPGQGRSGESVEEVPLYGNLHYLQTGRLSQDPEPDQQDPTLGGPARAAEEVMCYTSLQLRPPQGRIPGPGTP

SEQ ID NO: 335 - protein, 85 aa, Artificial Sequence
  Synthetic Construct
KKRHCGYSKAFQDSDEEKMHYQNGQAPPPVFLPLHHPPGKLPEPQFYAEPHTYEEPGRAGRSFTREIEASRIHIEKIIGSGDSGE

SEQ ID NO: 336 - protein, 85 aa, Artificial Sequence; identical to SEQ ID NO: 21
  Synthetic Construct

SEQ ID NO: 337 - protein, 86 aa, Artificial Sequence
  Synthetic Construct
MASPGAGRAPPELPERNCGYREVEYWDQRYQGAADSAPYDWFGDFSSFRALLEPELRPEDRILVLGCGNSALSYELFLGGFPNVTS

SEQ ID NO: 338 - protein, 86 aa, Artificial Sequence
  Synthetic Construct
MPHFTVVPVDGPRRGDYDNLEGLSWVDYGERAELDDSDGHGNHRESSPFLSPLEASRGIDYYDRNLALFEEELDIRPKVSSLLGKL

SEQ ID NO: 339 - protein, 89 aa, Artificial Sequence
  Synthetic Construct
AIPTRSLKFLKEAGHGTTKEEITKDAEGLDEIDHAEMELRRGQILWFRGLNRIQTQIDVINTFQTGASFKGVLRRQNMGQHLDVKLVPS

SEQ ID NO: 340 - protein, 89 aa, Artificial Sequence
  Synthetic Construct
IFMKTAQAHRRAETLIFSKHAVIALRHGRLCFMLRVGDLRKSMIISATIHMQVVRKTTSPEGEVVPLHQVDIPMENGVGGNSIFLVAPL

SEQ ID NO: 341 - protein, 89 aa, Artificial Sequence
  Synthetic Construct
SWKRYPASMKQLQQRSLMRRHRKKKRQSLKQMTPSTQEFYVDYKPTNTETSEMLLNGTGPCTYNKSGSRECEIPLSMNVSTFLAYDQPT

SEQ ID NO: 342 - protein, 91 aa, Artificial Sequence
  Synthetic Construct
MANVSKKVSWSGRDRDDEEAAPLLRRTARPGGGTPLLNGAGPGAARQSPRSALFRVGHMSSVELDDELLDPDMDPPHPFPKEIPHNEKLLS

SEQ ID NO: 343 - protein, 92 aa, Artificial Sequence
  Synthetic Construct
RLFKRRQGRIFPEGSCLNTFTKNPYAASKKTIYTYIMASRNTQPAESRIYDEILQSKVLPSKEEPVNTVYSEVQFADKMGKASTQDSKPPGT

SEQ ID NO: 344 - protein, 59 aa, Artificial Sequence
  Synthetic Construct
AMCLWKNRQQNTIQKYDPPGYLYQGSDMNGQMVDYTTLSGASQINGNVHGGFLTNGGLS

SEQ ID NO: 345 - protein, 92 aa, Artificial Sequence
  Synthetic Construct
LGSGFALKVQEQHRQKHFEKRRMPAANLIQAAWRLYSTDMSRAYLTATWYYYDSILPSFRELALLFEHVQRARNGGLRPLEVRRAPVPDGAP

SEQ ID NO: 346 - protein, 94 aa, Artificial Sequence
  Synthetic Construct
MSSHKGSVVAQGNGAPASNREADTVELAELGPLLEEKGKRVIANPPKAEEEQTCPVPQEEEEEVRVLTLPLQAHHAMEKMEEFVYKVWEGRWRV

SEQ ID NO: 347 - protein, 69 aa, Artificial Sequence
  Synthetic Construct
WRMMKYQQKAAGMSPEQVLQPLEGDLCYADLTLQLAGTSPQKATTKLSSAQVDQVEVEYVTMASLPKED

SEQ ID NO: 348 - protein, 95 aa, Artificial Sequence
  Synthetic Construct
HYARARRKPGGLSATGTSSHSPSECQEPSSSRPSRIDPQEPTHSKPLAPMELEPMYSNVNPGDSNPIYSQIWSIQHTKENSANCPMMHQEHEELT

SEQ ID NO: 349 - protein, 95 aa, Artificial Sequence
  Synthetic Construct
MAKRKQGNRLGVCGRFLSSRVSGMNPSSVVHHVSDSGPAAELPLDVPHIRLDSPPSFDNTTYTSLPLDSPSGKPSLPAPSSLPPLPPKVLVCSKP

SEQ ID NO: 350 - protein, 99 aa, Artificial Sequence
  Synthetic Construct
SPNRKNPLWPSVPDPAHSSLGSWVPTIMEEDAFQLPGLGTPPITKLTVLEEDEKKPVPWESHNSSETCGLPTLVQTYVLQGDPRAVSTQPQSQSGTSDQ

SEQ ID NO: 351 - protein, 156 aa, Artificial Sequence; identical to SEQ ID NO: 26
  Synthetic Construct

SEQ ID NO: 352 - protein, 4 aa, Artificial Sequence
  Synthetic Construct
QGVQ

SEQ ID NO: 353 - protein, 4 aa, Artificial Sequence
  Synthetic Construct
FSVR

SEQ ID NO: 354 - protein, 4 aa, Artificial Sequence
  Synthetic Construct
YSSK

SEQ ID NO: 355 - protein, 4 aa, Artificial Sequence
  Synthetic Construct
PKTR

SEQ ID NO: 356 - protein, 4 aa, Artificial Sequence
  Synthetic Construct
VNDT

SEQ ID NO: 357 - protein, 4 aa, Artificial Sequence
  Synthetic Construct
GMQQ

SEQ ID NO: 358 - protein, 4 aa, Artificial Sequence
  Synthetic Construct
PDLL

SEQ ID NO: 359 - protein, 4 aa, Artificial Sequence
  Synthetic Construct
HKSL

SEQ ID NO: 360 - protein, 5 aa, Artificial Sequence
  Synthetic Construct
RQPLN

SEQ ID NO: 361 - protein, 5 aa, Artificial Sequence
  Synthetic Construct
RTPTN

SEQ ID NO: 362 - protein, 5 aa, Artificial Sequence
  Synthetic Construct
RNLTN

SEQ ID NO: 363 - protein, 5 aa, Artificial Sequence
  Synthetic Construct
TVFSP

SEQ ID NO: 364 - protein, 5 aa, Artificial Sequence
  Synthetic Construct
NRFMK

SEQ ID NO: 365 - protein, 5 aa, Artificial Sequence
  Synthetic Construct
LNAIA

SEQ ID NO: 366 - protein, 5 aa, Artificial Sequence
  Synthetic Construct
LFTML

SEQ ID NO: 367 - protein, 5 aa, Artificial Sequence
  Synthetic Construct
MYVMG

SEQ ID NO: 368 - protein, 5 aa, Artificial Sequence
  Synthetic Construct
VTGTR

SEQ ID NO: 369 - protein, 5 aa, Artificial Sequence
  Synthetic Construct
TTHRR

SEQ ID NO: 370 - protein, 5 aa, Artificial Sequence
  Synthetic Construct
VTRRK

SEQ ID NO: 371 - protein, 5 aa, Artificial Sequence
  Synthetic Construct
VTPVR

SEQ ID NO: 372 - protein, 5 aa, Artificial Sequence
  Synthetic Construct
MTVRK

SEQ ID NO: 373 - protein, 5 aa, Artificial Sequence
  Synthetic Construct
MTVKR

SEQ ID NO: 374 - protein, 5 aa, Artificial Sequence
  Synthetic Construct
VTPRR

SEQ ID NO: 375 - protein, 5 aa, Artificial Sequence
  Synthetic Construct
KPWWD

SEQ ID NO: 376 - protein, 5 aa, Artificial Sequence
  Synthetic Construct
NRLMK

SEQ ID NO: 377 - protein, 5 aa, Artificial Sequence
  Synthetic Construct
FKETV

SEQ ID NO: 378 - protein, 6 aa, Artificial Sequence
  Synthetic Construct
PFLKNT

SEQ ID NO: 379 - protein, 6 aa, Artificial Sequence
  Synthetic Construct
VTQRRG

SEQ ID NO: 380 - protein, 6 aa, Artificial Sequence
  Synthetic Construct
MTERKA

SEQ ID NO: 381 - protein, 6 aa, Artificial Sequence
  Synthetic Construct
VTMRRT

SEQ ID NO: 382 - protein, 6 aa, Artificial Sequence
  Synthetic Construct
RQALAE

SEQ ID NO: 383 - protein, 6 aa, Artificial Sequence
  Synthetic Construct
APDSNT

SEQ ID NO: 384 - protein, 6 aa, Artificial Sequence
  Synthetic Construct
SKKRGG

SEQ ID NO: 385 - protein, 6 aa, Artificial Sequence
  Synthetic Construct
EISAAS

SEQ ID NO: 386 - protein, 6 aa, Artificial Sequence
  Synthetic Construct
STLGPG

SEQ ID NO: 387 - protein, 6 aa, Artificial Sequence
  Synthetic Construct
NSLSFL

SEQ ID NO: 388 - protein, 6 aa, Artificial Sequence
  Synthetic Construct
AHLVQY

SEQ ID NO: 389 - protein, 7 aa, Artificial Sequence
  Synthetic Construct
DEHDAII

SEQ ID NO: 390 - protein, 7 aa, Artificial Sequence
  Synthetic Construct
VTKRCAR

SEQ ID NO: 391 - protein, 7 aa, Artificial Sequence
  Synthetic Construct
KRIEHAK

SEQ ID NO: 392 - protein, 7 aa, Artificial Sequence
  Synthetic Construct
VTPWRLR

SEQ ID NO: 393 - protein, 7 aa, Artificial Sequence
  Synthetic Construct
VTPCRLR

SEQ ID NO: 394 - protein, 7 aa, Artificial Sequence
  Synthetic Construct
RWGFSKQ

SEQ ID NO: 395 - protein, 7 aa, Artificial Sequence
  Synthetic Construct
RGDDKDC

SEQ ID NO: 396 - protein, 7 aa, Artificial Sequence
  Synthetic Construct
ATRMMMG

SEQ ID NO: 397 - protein, 7 aa, Artificial Sequence
  Synthetic Construct
GPSRDPD

SEQ ID NO: 398 - protein, 8 aa, Artificial Sequence
  Synthetic Construct
VTLPRARR

SEQ ID NO: 399 - protein, 8 aa, Artificial Sequence
  Synthetic Construct
RLPYQLAQ

SEQ ID NO: 400 - protein, 8 aa, Artificial Sequence
  Synthetic Construct
LGSFLIGS

SEQ ID NO: 401 - protein, 8 aa, Artificial Sequence
  Synthetic Construct
MGDDSSNS

SEQ ID NO: 402 - protein, 8 aa, Artificial Sequence
  Synthetic Construct
PLSHLAQN

SEQ ID NO: 403 - protein, 8 aa, Artificial Sequence
  Synthetic Construct
ATEGKSVC

SEQ ID NO: 404 - protein, 9 aa, Artificial Sequence
  Synthetic Construct
HNNCEKDSV

SEQ ID NO: 405 - protein, 9 aa, Artificial Sequence
  Synthetic Construct
RTMKPLPRH

SEQ ID NO: 406 - protein, 9 aa, Artificial Sequence
  Synthetic Construct
SQRRNPWQA

SEQ ID NO: 407 - protein, 9 aa, Artificial Sequence
  Synthetic Construct
YPMKITGNR

SEQ ID NO: 408 - protein, 9 aa, Artificial Sequence
  Synthetic Construct
VSHLRSPRK

SEQ ID NO: 409 - protein, 9 aa, Artificial Sequence
  Synthetic Construct
SYPARTRKV

SEQ ID NO: 410 - protein, 9 aa, Artificial Sequence
  Synthetic Construct
WGRLRFARK

SEQ ID NO: 411 - protein, 9 aa, Artificial Sequence
  Synthetic Construct
VFLNKVMRG

SEQ ID NO: 412 - protein, 8 aa, Artificial Sequence
  Synthetic Construct
SGSGYQLV

SEQ ID NO: 413 - protein, 9 aa, Artificial Sequence
  Synthetic Construct
HSDSLGSAS

SEQ ID NO: 414 - protein, 9 aa, Artificial Sequence
  Synthetic Construct
KATVHLAYL

SEQ ID NO: 415 - protein, 10 aa, Artificial Sequence
  Synthetic Construct
CAEDYHWQWR

SEQ ID NO: 416 - protein, 10 aa, Artificial Sequence
  Synthetic Construct
QRLLVKAKTQ

SEQ ID NO: 417 - protein, 10 aa, Artificial Sequence
  Synthetic Construct
EDFLEESRNQ

SEQ ID NO: 418 - protein, 10 aa, Artificial Sequence
  Synthetic Construct
GEKAFGWPGK

SEQ ID NO: 419 - protein, 10 aa, Artificial Sequence
  Synthetic Construct
PTVSPFLRQR

SEQ ID NO: 420 - protein, 10 aa, Artificial Sequence
  Synthetic Construct
PRTVLWLTIE

SEQ ID NO: 421 - protein, 10 aa, Artificial Sequence
  Synthetic Construct
EVCWKLPQSK

SEQ ID NO: 422 - protein, 10 aa, Artificial Sequence
  Synthetic Construct
ISNRWLSIGV

SEQ ID NO: 423 - protein, 10 aa, Artificial Sequence
  Synthetic Construct
GNCSFFTETG

SEQ ID NO: 424 - protein, 10 aa, Artificial Sequence
  Synthetic Construct
DSIRGYFGET

SEQ ID NO: 425 - protein, 11 aa, Artificial Sequence
  Synthetic Construct
LHSNSFIRNNY

SEQ ID NO: 426 - protein, 11 aa, Artificial Sequence
  Synthetic Construct
TYYSETTVTRT

SEQ ID NO: 427 - protein, 11 aa, Artificial Sequence
  Synthetic Construct
TYYSRRTLLGV

SEQ ID NO: 428 - protein, 11 aa, Artificial Sequence
  Synthetic Construct
SSYFLGKLLSD

SEQ ID NO: 429 - protein, 11 aa, Artificial Sequence
  Synthetic Construct
QARLRQHYQTI

SEQ ID NO: 430 - protein, 12 aa, Artificial Sequence
  Synthetic Construct
LVFHHMAQHLMM

SEQ ID NO: 431 - protein, 12 aa, Artificial Sequence
  Synthetic Construct
YSTKITIPVIKR

SEQ ID NO: 432 - protein, 12 aa, Artificial Sequence
  Synthetic Construct
TYHSERTVTFTY

SEQ ID NO: 433 - protein, 12 aa, Artificial Sequence
  Synthetic Construct
PGSNYSEGWHIS

SEQ ID NO: 434 - protein, 12 aa, Artificial Sequence
  Synthetic Construct
LCANKKSSVKIT

SEQ ID NO: 435 - protein, 12 aa, Artificial Sequence
  Synthetic Construct
DGSPDYQKAKLQ

SEQ ID NO: 436 - protein, 12 aa, Artificial Sequence
  Synthetic Construct
VRRQLPVEEPNP

SEQ ID NO: 437 - protein, 12 aa, Artificial Sequence
  Synthetic Construct
KLNQVVRKVSAL

SEQ ID NO: 438 - protein, 12 aa, Artificial Sequence
  Synthetic Construct
ILRDYKQSSSTL

SEQ ID NO: 439 - protein, 13 aa, Artificial Sequence
  Synthetic Construct
DPAKYARWKPWLK

SEQ ID NO: 440 - protein, 13 aa, Artificial Sequence
  Synthetic Construct
QLRFNKPVRYAAT

SEQ ID NO: 441 - protein, 13 aa, Artificial Sequence
  Synthetic Construct
ELRFNKCVRLCGT

SEQ ID NO: 442 - protein, 13 aa, Artificial Sequence
  Synthetic Construct
GLKDQVNTVGIPI

SEQ ID NO: 443 - protein, 14 aa, Artificial Sequence
  Synthetic Construct
YKTSQNALDFNTKV

SEQ ID NO: 444 - protein, 14 aa, Artificial Sequence
  Synthetic Construct
PSENKENSAVPVEE

SEQ ID NO: 445 - protein, 14 aa, Artificial Sequence
  Synthetic Construct
ARTKISDDDDEHTL

SEQ ID NO: 446 - protein, 14 aa, Artificial Sequence
  Synthetic Construct
PITKWLPAYKFKEY

SEQ ID NO: 447 - protein, 14 aa, Artificial Sequence
  Synthetic Construct
SNLDEVGQQVERLD

SEQ ID NO: 448 - protein, 14 aa, Artificial Sequence
  Synthetic Construct
RATASLNANEVEWF

SEQ ID NO: 449 - protein, 15 aa, Artificial Sequence
  Synthetic Construct
EMRFSRAVRLCGTLQ

SEQ ID NO: 450 - protein, 15 aa, Artificial Sequence
  Synthetic Construct
RICSLTASEGPQQKI

SEQ ID NO: 451 - protein, 11 aa, Artificial Sequence
  Synthetic Construct
PLSPYGDIIEK

SEQ ID NO: 452 - protein, 15 aa, Artificial Sequence
  Synthetic Construct
TSESKENCTGVQVAE

SEQ ID NO: 453 - protein, 15 aa, Artificial Sequence
  Synthetic Construct
SQMNPRSPPATMCSP

SEQ ID NO: 454 - protein, 15 aa, Artificial Sequence
  Synthetic Construct
MHPDALEEPDDQNRI

SEQ ID NO: 455 - protein, 15 aa, Artificial Sequence
  Synthetic Construct
LSRMQHQSQECKSEE

SEQ ID NO: 456 - protein, 16 aa, Artificial Sequence
  Synthetic Construct
QEPNESDLPYHEMETL

SEQ ID NO: 457 - protein, 16 aa, Artificial Sequence
  Synthetic Construct
SRENSSSQDPQTEGTR

SEQ ID NO: 458 - protein, 16 aa, Artificial Sequence
  Synthetic Construct
EPSGHEKEGFMEAEQC

SEQ ID NO: 459 - protein, 16 aa, Artificial Sequence
  Synthetic Construct
KGSNYHLSDNDASDVE

SEQ ID NO: 460 - protein, 16 aa, Artificial Sequence
  Synthetic Construct
HTQSAEPPPPPEPARI

SEQ ID NO: 461 - protein, 16 aa, Artificial Sequence
  Synthetic Construct
CLISEERNECVIATEV

SEQ ID NO: 462 - protein, 16 aa, Artificial Sequence
  Synthetic Construct
ASWATNLKSSIRKANK

SEQ ID NO: 463 - protein, 17 aa, Artificial Sequence
  Synthetic Construct
TSMQPTEAMGEEPSRAE

SEQ ID NO: 464 - protein, 17 aa, Artificial Sequence
  Synthetic Construct
LSQEHRLLRHSSMADKK

SEQ ID NO: 465 - protein, 17 aa, Artificial Sequence
  Synthetic Construct
YSQKPPKRASSQLSWFS

SEQ ID NO: 466 - protein, 18 aa, Artificial Sequence
  Synthetic Construct
PRRPGEPREVHIGRALGR

SEQ ID NO: 467 - protein, 18 aa, Artificial Sequence
  Synthetic Construct
DTLSTRPGYLWVVWIYRN

SEQ ID NO: 468 - protein, 18 aa, Artificial Sequence
  Synthetic Construct
SIMNADILNYCQKESWCK

SEQ ID NO: 469 - protein, 18 aa, Artificial Sequence
  Synthetic Construct
NRGPPLDRAEVYSSKLQD

SEQ ID NO: 470 - protein, 19 aa, Artificial Sequence
  Synthetic Construct
ISKLSHSKGHQKRKALKTT

SEQ ID NO: 471 - protein, 19 aa, Artificial Sequence
  Synthetic Construct
DQNVNEAMPSLKITNDYIF

SEQ ID NO: 472 - protein, 16 aa, Artificial Sequence
  Synthetic Construct
DNSPLRRKSIYLVIIV

SEQ ID NO: 473 - protein, 19 aa, Artificial Sequence
  Synthetic Construct
QGQRSDVYSDLNTQRPYYK

SEQ ID NO: 474 - protein, 19 aa, Artificial Sequence
  Synthetic Construct
EIYLEPLKDAGDGVRYLLR

SEQ ID NO: 475 - protein, 19 aa, Artificial Sequence
  Synthetic Construct
LKHDTNIYCRMDHKAEVAS

SEQ ID NO: 476 - protein, 19 aa, Artificial Sequence
  Synthetic Construct
QWPALKEKYPKSVYLGRIV

SEQ ID NO: 477 - protein, 20 aa, Artificial Sequence
  Synthetic Construct
GKIFSSCFHNTILCMQKESE

SEQ ID NO: 478 - protein, 20 aa, Artificial Sequence
  Synthetic Construct
LDDHDYGSWGNYNNPLYDDS

SEQ ID NO: 479 - protein, 20 aa, Artificial Sequence
  Synthetic Construct
VRENHGLLPPLYKSVKTYTV

SEQ ID NO: 480 - protein, 20 aa, Artificial Sequence
  Synthetic Construct
PCTAQECLASVLKPTNETLN

SEQ ID NO: 481 - protein, 20 aa, Artificial Sequence
  Synthetic Construct
PNCNKPRWEKWFMVTFASST

SEQ ID NO: 482 - protein, 21 aa, Artificial Sequence
  Synthetic Construct
GYKAFGLVGKLAASGSITMQN

SEQ ID NO: 483 - protein, 21 aa, Artificial Sequence
  Synthetic Construct
FGRTVAIKPPKCWTGRFLMNL

SEQ ID NO: 484 - protein, 21 aa, Artificial Sequence
  Synthetic Construct
FRRTVSSKTPKCPTGRLLMNL

SEQ ID NO: 485 - protein, 21 aa, Artificial Sequence
  Synthetic Construct
NFHGMNPSKDTSTEYSEVRTQ

SEQ ID NO: 486 - protein, 21 aa, Artificial Sequence
  Synthetic Construct
HNPTLQVFRKTALLGANGAQP

SEQ ID NO: 487 - protein, 21 aa, Artificial Sequence
  Synthetic Construct
GELSLASLHIPFVETQHQTQV

SEQ ID NO: 488 - protein, 22 aa, Artificial Sequence
  Synthetic Construct
GEEGVALPANGAGGPGGASARK

SEQ ID NO: 489 - protein, 22 aa, Artificial Sequence
  Synthetic Construct
DRRSNQVARALHDHLGLRQGDC

SEQ ID NO: 490 - protein, 22 aa, Artificial Sequence
  Synthetic Construct
NHRVDASSMWLYRRYYSNVCQR

SEQ ID NO: 491 - protein, 22 aa, Artificial Sequence
  Synthetic Construct
QKMDSLDAMEGDVELEWEETTM

SEQ ID NO: 492 - protein, 23 aa, Artificial Sequence
  Synthetic Construct
FHTLRGKGQAAEPPDFNPRDSYS

SEQ ID NO: 493 - protein, 23 aa, Artificial Sequence
  Synthetic Construct
SVYQYGSALAHFFYSSDQAWYDR

SEQ ID NO: 494 - protein, 23 aa, Artificial Sequence
  Synthetic Construct
DSAEAPADPFAVPEGRSQDARGY

SEQ ID NO: 495 - protein, 23 aa, Artificial Sequence
  Synthetic Construct
SAGNGGSSLSYTNPAVAATSANL

SEQ ID NO: 496 - protein, 23 aa, Artificial Sequence
  Synthetic Construct
KAKLQSSPDYLQVLEEQTALNKI

SEQ ID NO: 497 - protein, 24 aa, Artificial Sequence
  Synthetic Construct
LLKGLGRRQACGYCVFWLLNPLPM

SEQ ID NO: 498 - protein, 24 aa, Artificial Sequence
  Synthetic Construct
SRGLQGTYQDVGSLNIGDVQLEKP

SEQ ID NO: 499 - protein, 24 aa, Artificial Sequence
  Synthetic Construct
APVVFFYLSQDSRPRSWCLRTVCN

SEQ ID NO: 500 - protein, 24 aa, Artificial Sequence
  Synthetic Construct
HFHKVQPQEPKVTDTEYSEIKIHK

SEQ ID NO: 501 - protein, 24 aa, Artificial Sequence
  Synthetic Construct
SISLHGLSQVSEDPPSVFNMPEAD

SEQ ID NO: 502 - protein, 24 aa, Artificial Sequence
  Synthetic Construct
VNNCEHFVTLLRYGEGVSEQANRA

SEQ ID NO: 503 - protein, 24 aa, Artificial Sequence
  Synthetic Construct
QNWGPRFKKLADLYGSKDTFDDDS

SEQ ID NO: 504 - protein, 25 aa, Artificial Sequence
  Synthetic Construct
KLRSDCSRPSLQWYTRAQSKMRRPS

SEQ ID NO: 505 - protein, 25 aa, Artificial Sequence
  Synthetic Construct
DHSRSTKAVSEKKAKGLGESRKDKK

SEQ ID NO: 506 - protein, 25 aa, Artificial Sequence
  Synthetic Construct
STGLTWRSGTASSVSYPKQMPLSQV

SEQ ID NO: 507 - protein, 25 aa, Artificial Sequence
  Synthetic Construct
AATVFFCLGQTTRPRSWCLRLVCNP

SEQ ID NO: 508 - protein, 26 aa, Artificial Sequence
  Synthetic Construct
YAANPVITPEPVTSPPSYSSEIQANK

SEQ ID NO: 509 - protein, 26 aa, Artificial Sequence
  Synthetic Construct
NHCVFTQRKITRPSQRPKTPPTDTSV

SEQ ID NO: 510 - protein, 26 aa, Artificial Sequence
  Synthetic Construct
TQGAKEHEEAESGEGTRRRAAEAPSM

SEQ ID NO: 511 - protein, 27 aa, Artificial Sequence
  Synthetic Construct
DHLALSRPRRLSTADPADASTIYAVVV

SEQ ID NO: 512 - protein, 27 aa, Artificial Sequence
  Synthetic Construct
STSALSEAASDTTQEPPGSHEYAALKV

SEQ ID NO: 513 - protein, 27 aa, Artificial Sequence
  Synthetic Construct
SFHKGEPQDLSGQEATNNEYSEIKIPK

SEQ ID NO: 514 - protein, 27 aa, Artificial Sequence
  Synthetic Construct
EGALHRSSMQPDNSSDSDYDLHGAQRL

SEQ ID NO: 515 - protein, 27 aa, Artificial Sequence
  Synthetic Construct
SFHKARPQYPQEQEAIGYEYSEINIPK

SEQ ID NO: 516 - protein, 27 aa, Artificial Sequence
  Synthetic Construct
SFQMVKPWDSRGQEATDTEYSEIKIHR

SEQ ID NO: 517 - protein, 27 aa, Artificial Sequence
  Synthetic Construct
IFPGGNKGGGTSCGPAQNPPNNQTPSS

SEQ ID NO: 518 - protein, 28 aa, Artificial Sequence
  Synthetic Construct
ELPTATQAQNDYGPQQKSSSSRPSCSCL

SEQ ID NO: 519 - protein, 28 aa, Artificial Sequence
  Synthetic Construct
KVPAEEPANELPMNEIEAWKAAEKKARW

SEQ ID NO: 520 - protein, 28 aa, Artificial Sequence
  Synthetic Construct
SHQWKSSEDNSKTFSASHNVEATSMFQL

SEQ ID NO: 521 - protein, 28 aa, Artificial Sequence
  Synthetic Construct
KEEEMADTSYGTVKAENIIMMETAQTSL

SEQ ID NO: 522 - protein, 28 aa, Artificial Sequence
  Synthetic Construct
NLTALDWSLLSKKECLSYGGRLLGNSCK

SEQ ID NO: 523 - protein, 28 aa, Artificial Sequence
  Synthetic Construct
SFSEMKSREPKDQEAPSTTEYSEIKTSK

SEQ ID NO: 524 - protein, 28 aa, Artificial Sequence
  Synthetic Construct
ELIKPHRAAKGAPTSTVYAQILFEENKL

SEQ ID NO: 525 - protein, 29 aa, Artificial Sequence
  Synthetic Construct
NHSVIGPNSRLARNVKEAPTEYASICVRS

SEQ ID NO: 526 - protein, 29 aa, Artificial Sequence
  Synthetic Construct
DLASQPVYCNLQSLGQAPMDEEEYVIPGH

SEQ ID NO: 527 - protein, 29 aa, Artificial Sequence
  Synthetic Construct
DYDNSENQLFLEEERRINHTAFRTVEIKR

SEQ ID NO: 528 - protein, 25 aa, Artificial Sequence
  Synthetic Construct
DHSGGHHSDKINKSESVVYADIRKN

SEQ ID NO: 529 - protein, 33 aa, Artificial Sequence
  Synthetic Construct
DHWALTQRTARAVSPQSTKPMAESITYAAVARH

SEQ ID NO: 530 - protein, 18 aa, Artificial Sequence
  Synthetic Construct
ENLIYENVAAIQAHKLEV

SEQ ID NO: 531 - protein, 30 aa, Artificial Sequence
  Synthetic Construct
SETTGLTPDQVKRNLEKYGLNELPAEEGKT

SEQ ID NO: 532 - protein, 18 aa, Artificial Sequence
  Synthetic Construct
SLCYKFLSYFRASSTMRY

SEQ ID NO: 533 - protein, 30 aa, Artificial Sequence
  Synthetic Construct
KLEKLVSSLREEDEYSIHPPSSRWKRFYRA

SEQ ID NO: 534 - protein, 26 aa, Artificial Sequence
  Synthetic Construct
SHLRKIRTCTSIMEKDLTYSSVKRHL

SEQ ID NO: 535 - protein, 31 aa, Artificial Sequence
  Synthetic Construct
ALSSSTSPRAPPSHRPLKSPQNETLYSVLKA

SEQ ID NO: 536 - protein, 32 aa, Artificial Sequence
  Synthetic Construct
DPENQNFLLESNLGKKKYETEFHPGTTSFGMS

SEQ ID NO: 537 - protein, 32 aa, Artificial Sequence
  Synthetic Construct
FTYGVRFLKKTPWLWNTRHCWYNYPYQPLTTD

SEQ ID NO: 538 - protein, 32 aa, Artificial Sequence
  Synthetic Construct
KTLRSLEATDSAFDNPDYWHSRLFPKANAQRT

SEQ ID NO: 539 - protein, 33 aa, Artificial Sequence
  Synthetic Construct
QFQNSSEMEKIPEIGKFGEKAPPAPSHVWRPAA

SEQ ID NO: 540 - protein, 33 aa, Artificial Sequence
  Synthetic Construct
TFQDSAGARNNRDGNNLRKRGHPAPSPIWRHAA

SEQ ID NO: 541 - protein, 33 aa, Artificial Sequence
  Synthetic Construct
LALSSGSRKASAVGDVVNLVSVDVQRLTESVLY

SEQ ID NO: 542 - protein, 33 aa, Artificial Sequence
  Synthetic Construct
DILRPYFDVEPAQVRSRLLESMIPIKMVNFPQK

SEQ ID NO: 543 - protein, 33 aa, Artificial Sequence
  Synthetic Construct
TCQFEGLLRPYIQHAMYDEEKGTPIFICPVSWG

SEQ ID NO: 544 - protein, 34 aa, Artificial Sequence
  Synthetic Construct
LQLDKVDVIPVTAINLYPDGPEKRAENLEDKTCI

SEQ ID NO: 545 - protein, 34 aa, Artificial Sequence
  Synthetic Construct
CPVFKGFSSSSKDQIAIPEDTPENTETASVCTKV

SEQ ID NO: 546 - protein, 30 aa, Artificial Sequence
  Synthetic Construct
NFEAQQPTQPTSASPSLTATEIIYSEVKKQ

SEQ ID NO: 547 - protein, 31 aa, Artificial Sequence
  Synthetic Construct
WSMQQPESSANIRTLLENKDSQVIYSSVKKS

SEQ ID NO: 548 - protein, 36 aa, Artificial Sequence
  Synthetic Construct
GRQPGKREPLRSVLRRALGEGAELGARGQSLPMGLL

SEQ ID NO: 549 - protein, 36 aa, Artificial Sequence
  Synthetic Construct
PDWLKDNDYLLHGHRPPMPSFRACFKSIFRIHTETG

SEQ ID NO: 550 - protein, 36 aa, Artificial Sequence
  Synthetic Construct
DGSHIHTFLDVSFSEALYPVFRILTLEPTALTICPA

SEQ ID NO: 551 - protein, 33 aa, Artificial Sequence; identical to SEQ ID NO: 529
  Synthetic Construct

SEQ ID NO: 552 - protein, 33 aa, Artificial Sequence
  Synthetic Construct
HSLTLRREATEPPPSQEREPPAEPSIYAPLAIH

SEQ ID NO: 553 - protein, 38 aa, Artificial Sequence
  Synthetic Construct
RFKNEFKSSGINTASSAASKERTAPHKSNTGFPKLLCA

SEQ ID NO: 554 - protein, 39 aa, Artificial Sequence
  Synthetic Construct
REKMWHGRQRLGGVGAGSRPPMPAHPTPASIFSARSTDV

SEQ ID NO: 555 - protein, 39 aa, Artificial Sequence
  Synthetic Construct
KKTHPDDSAGEASSRGRAHEEDDEENYENVPRVLLASDH

SEQ ID NO: 556 - protein, 40 aa, Artificial Sequence
  Synthetic Construct
GSAQGRRLPLRLVLQRALGDEAELGAVRETSRRGLVDIAA

SEQ ID NO: 557 - protein, 40 aa, Artificial Sequence
  Synthetic Construct
SSPTSPTSPGPQQAPPRETYLSEKIPIPDTKPGTFSLRKL

SEQ ID NO: 558 - protein, 40 aa, Artificial Sequence
  Synthetic Construct
AGFPKTRLGRLATSTSRSRQLSLCDDYEEQTDEYFFDRDP

SEQ ID NO: 559 - protein, 40 aa, Artificial Sequence
  Synthetic Construct
KSLMARRTYLEWPKEKSKRGLFWANLRAAINIKLTEQAKK

SEQ ID NO: 560 - protein, 41 aa, Artificial Sequence
  Synthetic Construct
LPWEPSLESEEEVEEEETSEALVLNPRRHQDSSRNKAGGLP

SEQ ID NO: 561 - protein, 41 aa, Artificial Sequence
  Synthetic Construct
KESDHFSTELDDITVTDTYLSATKVSFDDTCLASEVSFSQS

SEQ ID NO: 562 - protein, 41 aa, Artificial Sequence
  Synthetic Construct
QNLCSRLKTSPVEGLSGNPADLEKRRQVFGHNVIPPKKPKT

SEQ ID NO: 563 - protein, 35 aa, Artificial Sequence
  Synthetic Construct
NHCVFTQRKITRPSQRPKTPPTDIIVYTELPNAEP

SEQ ID NO: 564 - protein, 33 aa, Artificial Sequence
  Synthetic Construct
TMKTSDKFKFVFREKMGRIVDYFTIQNPSNVDH

SEQ ID NO: 565 - protein, 43 aa, Artificial Sequence
  Synthetic Construct
SENFRKAYKQVFKCHIRKDSHLSDTKESKSRIDTPPSTNCTHV

SEQ ID NO: 566 - protein, 43 aa, Artificial Sequence
  Synthetic Construct
EFMNEQKLNRYPASSLVVVRSKTEDHEEAGPLPTKVNLAHSEI

SEQ ID NO: 567 - protein, 43 aa, Artificial Sequence
  Synthetic Construct
GNYRLKEYEKALKYVRGLLQTEPQNNQAKELERLIDKAMKKDG

SEQ ID NO: 568 - protein, 43 aa, Artificial Sequence
  Synthetic Construct
PAGEEDEEEEEDLGWGCPDVAGPTRPTAPPDLHNYMRRIKEIA

SEQ ID NO: 569 - protein, 43 aa, Artificial Sequence
  Synthetic Construct
SGLREQTIAIKCLVVLVVALGLPFLAIGYWIAPCSRLGKILRS

SEQ ID NO: 570 - protein, 43 aa, Artificial Sequence
  Synthetic Construct
SGLRQQTMAVKFLVVLAVAIGLPFLALIYWFAPCSKMGKIMRG

SEQ ID NO: 571 - protein, 43 aa, Artificial Sequence; identical to SEQ ID NO: 570
  Synthetic Construct

SEQ ID NO: 572 - protein, 44 aa, Artificial Sequence
  Synthetic Construct
PPVSRAYTTACVLTTAAVQLELITPFQLYFNPELIFKHFQIWRL

SEQ ID NO: 573 - protein, 44 aa, Artificial Sequence
  Synthetic Construct
GNVLILRSVSTAVYKRFPSAQHLVQAGFMTPAEHKQLEKLSLPH

SEQ ID NO: 574 - protein, 44 aa, Artificial Sequence
  Synthetic Construct
QNWWTRRKVRQEHGPERKISFPQWEKDYNLQPMNAYGLFDEYLE

SEQ ID NO: 575 - protein, 45 aa, Artificial Sequence
  Synthetic Construct
DSNIAFSVNASDKGEASCCDPVSAAFEGCLRRLFTRWGSFCVRNP

SEQ ID NO: 576 - protein, 45 aa, Artificial Sequence
  Synthetic Construct
QVSSAESHKDLGKKDTETVYSEVRKAVPDAVESRYSRTEGSLDGT

SEQ ID NO: 577 - protein, 45 aa, Artificial Sequence
  Synthetic Construct
VLDSEPKSQASGPEPELYASVCAQTRRARASFPDQAYANSQPAAS

SEQ ID NO: 578 - protein, 46 aa, Artificial Sequence
  Synthetic Construct
ETGINLRGALLAMIYNKILRLSTSNLSMGEMTLGQINNLVAIETNQ

SEQ ID NO: 579 - protein, 46 aa, Artificial Sequence
  Synthetic Construct
AAGRARAKACRAPGSYGRGTHCHYKAPTVVLHMTKTDPSLENPTHL

SEQ ID NO: 580 - protein, 46 aa, Artificial Sequence
  Synthetic Construct
HHELLSHKSFETNAQEDTMETHLETELDLSTITTAGRISDHKQQLA

SEQ ID NO: 581 - protein, 47 aa, Artificial Sequence
  Synthetic Construct
DQKYVLILNVFPAPPKRSFLPQVLTEWYIPLEKDERHQWIVLLSFQL

SEQ ID NO: 582 - protein, 47 aa, Artificial Sequence
  Synthetic Construct
LQTVYLGKNSEAQPARQILVLDNAAIVCNFGSELSLVYVPSVLEKLD

SEQ ID NO: 583 - protein, 48 aa, Artificial Sequence
  Synthetic Construct
RKDSEEEVSLLGSQDIEEGNHQVEDGCREMACEEFNFGEILMTQVIHS

SEQ ID NO: 584 - protein, 47 aa, Artificial Sequence
  Synthetic Construct
QRRETEVYACIENEDGSSPTAKQSPLSQERPHRFEDDGELNLVYENL

SEQ ID NO: 585 - protein, 48 aa, Artificial Sequence
  Synthetic Construct
APCAKVRPYIAEGESDTDSDLCTPCGPPPRSATGEGPFGDVGWAGPRK

SEQ ID NO: 586 - protein, 49 aa, Artificial Sequence
  Synthetic Construct
ERLGYSEDGLEELSRHSVSEADRLLSARSSVDFQAFGVKGGRRINEYFC

SEQ ID NO: 587 - protein, 49 aa, Artificial Sequence
  Synthetic Construct
RQRLCRQSVLLWPHQPSGQRSFWAQLGMALTRDNHHFYNRNFCQGPTAE

SEQ ID NO: 588 - protein, 49 aa, Artificial Sequence
  Synthetic Construct
LHRDYDRTVTLLSPPRPGRLPDLQEIGVPLYQSPPGRYLSPKKGANENV

SEQ ID NO: 589 - protein, 50 aa, Artificial Sequence
  Synthetic Construct
RSPFYDRFSEARILFLLQLLADHVPGVGLVTRPLMDYLPTWQKIYFYSWG

SEQ ID NO: 590 - protein, 50 aa, Artificial Sequence
  Synthetic Construct
NPSPDTRIELNDVVYLIRPDPLAYLPNSEPSRRNSICNVTGQDSREETQL

SEQ ID NO: 591 - protein, 51 aa, Artificial Sequence
  Synthetic Construct
RDIYAQRMHTFITSLSSVGIVVSDPDSTDASSIEDNEDICNTTSLENCTAK

SEQ ID NO: 592 - protein, 51 aa, Artificial Sequence
  Synthetic Construct
SFQGLRLWEPADQEAPSTTEYSEIKIHTGQPLRGPGFGLQLEREMSGMVPK

SEQ ID NO: 593 - protein, 51 aa, Artificial Sequence
  Synthetic Construct
LVSSVADVLAQGGGPRSSQHCGEGSQLVAADHRGGLDGWEQPGAGQPPSDT

SEQ ID NO: 594 - protein, 51 aa, Artificial Sequence
  Synthetic Construct
VVSDSGISTDYSSGDSQGAQGGLSDGPYSNPYENSLIPAAEPLPPSYVACS

SEQ ID NO: 595 - protein, 53 aa, Artificial Sequence
  Synthetic Construct
NPPPDTRLEPSDIVYLIRSDPLAHVASSSQSRKSSCSHKLSSCNPETRDETQL

SEQ ID NO: 596 - protein, 54 aa, Artificial Sequence
  Synthetic Construct
HPSCCWKPDPDQVDGARSLLSPEGYQLPQNRRMTHLAQKFFPKAKDEAASPVKG

SEQ ID NO: 597 - protein, 54 aa, Artificial Sequence
  Synthetic Construct
GKKFKRYFLQLLKYIPPKAKSHSNLSTKMSTLSYRPSDNVSSSTKKPAPCFEVE

SEQ ID NO: 598 - protein, 54 aa, Artificial Sequence
  Synthetic Construct
SDNFKKSFQNVLCLVKVSGTDDGERSDSKQDKSRLNETTETQRTLLNGDLQTSI

SEQ ID NO: 599 - protein, 54 aa, Artificial Sequence
  Synthetic Construct
SPTNNTVYASVTHSNRETEIWTPRENDTITIYSTINHSKESKPTFSRATALDNV

SEQ ID NO: 600 - protein, 55 aa, Artificial Sequence
  Synthetic Construct
LGGAAYVNTFHNIALETSDEHREFAMAATCISDTLGISLSGLLALPLHDFLCQLS

SEQ ID NO: 601 - protein, 35 aa, Artificial Sequence
  Synthetic Construct
MQKDSSQETTSCYEKIFYGHLLKKFRQPNFARKLC

SEQ ID NO: 602 - protein, 56 aa, Artificial Sequence
  Synthetic Construct
ALATSKALVKFDPEIIGPRDIIKIIEEIGFHASLAQRNPNAHHLDHKMEIKQWKKS

SEQ ID NO: 603 - protein, 43 aa, Artificial Sequence
  Synthetic Construct
NHCVFTQRKITRPSQRPKTPPTDIIVYTELPNAESRSKVVSCP

SEQ ID NO: 604 - protein, 43 aa, Artificial Sequence
  Synthetic Construct
DHCVFTQRKITRPSQRPKTPPTDTILYTELPNAKPRSKVVSCP

SEQ ID NO: 605 - protein, 58 aa, Artificial Sequence
  Synthetic Construct
ERKRIQYLHAKLLKKRSKQPLGEVKRRLSLYLTKIHFWLPVLKMIRKKQMDMASADKS

SEQ ID NO: 606 - protein, 58 aa, Artificial Sequence
  Synthetic Construct
SEWLESIRMKRYILHFHSAGLDTMECVLELTAEDLTQMGITLPGHQKRILCSIQGFKD

SEQ ID NO: 607 - protein, 59 aa, Artificial Sequence
  Synthetic Construct
NADAKYPGYPPEHIIAEKRRARRRLLHKDGSCNVYFKHIFGEWGSYVVDIFTTLVDTKW

SEQ ID NO: 608 - protein, 60 aa, Artificial Sequence
  Synthetic Construct
HRTSKRSEARSAEFTVGRKDSSIICAEVRCLQPSEVSSTEVNMRSRTLQEPLSDCEEVLC

SEQ ID NO: 609 - protein, 61 aa, Artificial Sequence
  Synthetic Construct
IKYWFHTPPSIPLQIEEYLKDPTQPILEALDKDSSPKDDVWDSVSIISFPEKEQEDVLQTL

SEQ ID NO: 610 - protein, 62 aa, Artificial Sequence
  Synthetic Construct
RREPRQALAGTFRDLRLRLWPQGGGWVQQVALKQVGRRWVASNPRESRPSTLLTNLDRGTPG

SEQ ID NO: 611 - protein, 62 aa, Artificial Sequence
  Synthetic Construct
DFQWREKTPEPPVPCVPEQTEYATIVFPSGMGTSSPARRGSADGPRSAQPLRPEDGHCSWPL

SEQ ID NO: 612 - protein, 62 aa, Artificial Sequence
  Synthetic Construct
ENDEDGAQASPEPDGGVGTRDSSRTSIRSSQWSFSTISSSTQRSYNTCCSWTQHPLIQKNRR

SEQ ID NO: 613 - protein, 62 aa, Artificial Sequence
  Synthetic Construct
DEIYLESCCQARYHQKKEQMNEELKREAETLREREGEEFDNTCCAEKRKKLWDLLEKPNSSV

SEQ ID NO: 614 - protein, 64 aa, Artificial Sequence
  Synthetic Construct
DMRPPPTAMITLNNSVYWQEFEDTCVYECLDGKDCQSFFCCYEECKSGSWRKGRIHIDILELDS

SEQ ID NO: 615 - protein, 64 aa, Artificial Sequence
  Synthetic Construct
GTLAWMITLSDGLHNFIDGLAIGASFTVSVFQGISTSVAILCEEFPHELGDFVILLNAGMSIQQ

SEQ ID NO: 616 - protein, 64 aa, Artificial Sequence
  Synthetic Construct
GHNEVIGVCRVGPDAADPHGREHWAEMLANPRKPVEHWHQLVEEKTVTSFTKGSKGLSEKENSE

SEQ ID NO: 617 - protein, 66 aa, Artificial Sequence
  Synthetic Construct
PSLSTSNKNIYEVEPTVSVVQEGCGHNSSYIQNAYDLPRNSHIPGHYDLLPVRQSPANGPSQDKQS

SEQ ID NO: 618 - protein, 67 aa, Artificial Sequence
  Synthetic Construct
DEARLERCCLRRLRRREEEAAEARAGPTERGAQGSPARALGPRGRLQRGRRRLRDVVDNPHSGLAGK

SEQ ID NO: 619 - protein, 68 aa, Artificial Sequence
  Synthetic Construct
DELSIDSCCRDRYFRRKELSETLDFKKDTEDQESQHESEQDFSQGPCPTVRQKLWNILEKPGSSTAAR

SEQ ID NO: 620 - protein, 64 aa, Artificial Sequence
  Synthetic Construct
KETKVKELKRAKTVLTVIKWKGEKSKYPQGRFWKQLQVAMPVKKSPRRSSSDEQGLSYSSLKNV

SEQ ID NO: 621 - protein, 70 aa, Artificial Sequence
  Synthetic Construct
LSYNHHRLEEHEAETYEDGFTGNPSSLSQIPETNSEETTVIFEQLHSFVVDDDGFIEDKYIDIHELCEEN

SEQ ID NO: 622 - protein, 70 aa, Artificial Sequence
  Synthetic Construct
DESSSSPGRQMSSSDGGPPGQSDTDSSVEESDFDTMPDIESDKNIIRTKMFLYLSDLSRKDRRIVSKKYK

SEQ ID NO: 623 - protein, 50 aa, Artificial Sequence
  Synthetic Construct
RIIQEKKKHAVASDPRHLRNKGSPIIYSEVKVASTPVSGSLFLASSAPHR

SEQ ID NO: 624 - protein, 71 aa, Artificial Sequence
  Synthetic Construct
AEDHLDGCCKRRYLQKIEEFAEMVEREEEDDALDSEGRDSEGPAEGEGRLGRCMRRLRDMVERPHSGLPGK

SEQ ID NO: 625 - protein, 71 aa, Artificial Sequence
  Synthetic Construct
EDPWIGSESDKFILLGYLDQLRKDPALLSSEAVLPDLTDELAPVFLLRWFYSASDYISDCWDSIFHNNWRE

SEQ ID NO: 626 - protein, 72 aa, Artificial Sequence
  Synthetic Construct
MDRKWYFLCNSWLSINVGDCVLDKVFPVATEQDRKQFSHLFFMKTSAGFQDGHIWYSIFSRCARSSFTRVQR

SEQ ID NO: 627 - protein, 72 aa, Artificial Sequence
  Synthetic Construct
VPSDPSVEEMRKVVCEQKLRPNIPNRWQSCEALRVMAKIMRECWYANGAARLTALRIKKTLSQLSQQEGIKM

SEQ ID NO: 628 - protein, 72 aa, Artificial Sequence
  Synthetic Construct
CSDFQEDIVFPFSLGWSSLVHRFLGPRNAQRVLLGLSEPIFQLPRSLASTPTAPTTPATPDNASQEELMITL

SEQ ID NO: 629 - protein, 73 aa, Artificial Sequence
  Synthetic Construct
RIPLLGDEEEGSEDEGESTHLLPENENELEKFIHSVIISKRSKNIKKKLKEEQNSVTENKTKNASHNGKMEDL

SEQ ID NO: 630 - protein, 73 aa, Artificial Sequence
  Synthetic Construct
SKIPQITLNFVDLKGDPFLASPTSDREIIAPKIKERTHNVTEKVTQVLSLGADVLPEYKLQAPRIHRWTILHY

SEQ ID NO: 631 - protein, 74 aa, Artificial Sequence
  Synthetic Construct
DHCIFTQRKITGPSQRSKRPSTDTSVCIELPNAEPRALSPAHEHHSQALMGSSRETTALSQTQLASSNVPAAGI

SEQ ID NO: 632 - protein, 74 aa, Artificial Sequence
  Synthetic Construct
PRARIMQRKRGLEWFVCDGWKFLCTSCCGWLINICRRKKELKARTVWLGCPEKCEEKHPRNSIKNQKYNVFTFI

SEQ ID NO: 633 - protein, 74 aa, Artificial Sequence
  Synthetic Construct
SPRHYYSGYSSSPEYSSESTHKIWERFRPYKKHHREEVYMAAGHALRKKVQFAKDEDLHDILDYWKGVSAQQKL

SEQ ID NO: 634 - protein, 75 aa, Artificial Sequence
  Synthetic Construct
SPQYHSLSYSSSPEYTCRASQSIWERFRLSRRRHKEEEEFMAAGHALRKKVQFAKDEDLHDILDYWKGVSAQHKS

SEQ ID NO: 635 - protein, 76 aa, Artificial Sequence
  Synthetic Construct
MAFNAKVSDPLIGGTYMTLLNTVSNLGGNWPSTVALWLVDPLTVKECVGASNQNCRTPDAVELCKKLGGSCVTALD

SEQ ID NO: 636 - protein, 76 aa, Artificial Sequence
  Synthetic Construct
YYPHGHSHSLGLDLNLGLGSGTFHSLGNALVHGGELEMGHGGTHGFGYGVGHGLSHIHGDGYGVNHGGHYGHGGGH

SEQ ID NO: 637 - protein, 49 aa, Artificial Sequence
  Synthetic Construct
SFHKVKPQDPQGQEATDSEYSEIKIHKRETAETQACLRNHNPSSKEVRG

SEQ ID NO: 638 - protein, 76 aa, Artificial Sequence
  Synthetic Construct
NNSTSANRNVYEVEPTVSVVQGVFSNNGRLSQDPYDLPKNSHIPCHYDLLPVRDSSSSPKQEDSGGSSSNSSSSSE

SEQ ID NO: 639 - protein, 77 aa, Artificial Sequence
  Synthetic Construct
RREFRKALKSLLWRIASPSITSMRPFTATTKPEHEDQGLQAPAPPHAAAEPDLLYYPPGVVVYSGGRYDLLPSSSAY

SEQ ID NO: 640 - protein, 77 aa, Artificial Sequence
  Synthetic Construct
NELFIDSCCSNRYQERKEENHEKDWDQKSHDVSTDSSFEESSLFEKELEKFDTLRFGQLRKKIWIRMENPAYCLSAK

SEQ ID NO: 641 - protein, 77 aa, Artificial Sequence
  Synthetic Construct
NEFFIDSCCSYSYHGRKVEPEQEKWDEQSDQESTTSSFDEILAFYNDASKFDGQPLGNFRRQLWLALDNPGYSVLSR

SEQ ID NO: 642 - protein, 78 aa, Artificial Sequence
  Synthetic Construct
DATDQESLELKPTSRAGIKQKGLLLSSSLMHSESELDSDDAIFTWPDREKGKLLHGQNGSVPNGQTPLKARSPREEIL

SEQ ID NO: 643 - protein, 78 aa, Artificial Sequence
  Synthetic Construct
SRGASIPGTPPTAGRVVSLSPEDAPGPSLRRSGGCSPSSDTVFGPGAPAAAGAEACRRENRGTLYGTRSFTVSVAQKR

SEQ ID NO: 644 - protein, 79 aa, Artificial Sequence
  Synthetic Construct
NKTFSPAQRHGNSGITMMRKKAKFSLRENPVEETKGEAFSDGNIEVKLCEQTEEKKKLKRHLALFRSELAENSPLDSGH

SEQ ID NO: 645 - protein, 79 aa, Artificial Sequence
  Synthetic Construct
YESHRAGCEKYEGPYPQHPFYSSASGDVIGGLSREEIRQMYESSELSREEIQERMRVLELYANDPEFAAFVREQQVEEV

SEQ ID NO: 646 - protein, 79 aa, Artificial Sequence
  Synthetic Construct
FKNSDKEDDQEHPSEKQPSGAESGTLARASLALPTSSLSRTASQSSSHRGWEILRQNTLGHLNLGLNLSEGDGEEVYHF

SEQ ID NO: 647 - protein, 79 aa, Artificial Sequence
  Synthetic Construct
QDLKGDDTAVRDAHSKRDTKCQPQGSSGEEKGTPTTLRGGEASERKRPDSGCSTSKDTKYQSVYVISEEKDECVIATEV

SEQ ID NO: 648 - protein, 54 aa, Artificial Sequence
  Synthetic Construct
DHCVFIQRKISRPSQRPKTPLTDTSVYTELPNAEPRSKVVSCPRAPQSGLEGVF

SEQ ID NO: 649 - protein, 79 aa, Artificial Sequence
  Synthetic Construct
RDLPPLSSSEMEEFLTQESKKHENEFNEEVALTEIYKYIVKYFDEILNKLERERGLEEAQKQLLHVKVLFDEKKKCKWM

SEQ ID NO: 650 - protein, 81 aa, Artificial Sequence
  Synthetic Construct
LGSPTSPGPGHYLRCDSTQPLLAGLTPSPKSYENLWFQASPLGTLVTPAPSQEDDCVFGPLLNFPLLQGIRVHGMEALGSF

SEQ ID NO: 651 - protein, 81 aa, Artificial Sequence
  Synthetic Construct
LSQPGPTLPKTHVKTASLGLAGKARSPLLPVSVPTAPEVSEESHKPTEDSANVYEQDDLSEQMASLEGLMKQLNAITGSAF

SEQ ID NO: 652 - protein, 70 aa, Artificial Sequence
  Synthetic Construct
ATECGQGEEKSEGPLGSQESESCGLRKEEKEPHADKDFCQEKQVAYCPSGKPEGLNYACLTHSGYGDGSD

SEQ ID NO: 653 - protein, 82 aa, Artificial Sequence
  Synthetic Construct
KELILAVDGVLSVHSLHIWSLTMNQVILSAHVATAASRDSQVVRREIAKALSKSFTMHSLTIQMESPVDQDPDCLFCEDPCD

SEQ ID NO: 654 - protein, 82 aa, Artificial Sequence
  Synthetic Construct
TSFPRLPEDEPAPAAPLRGRKDEDAFLGDPDTDPDSFLKSARLQRLPSSSSEMGSQDGSPLRETRKDPFSAAAAECSCRQDG

SEQ ID NO: 655 - protein, 82 aa, Artificial Sequence
  Synthetic Construct
LEKERELQQLGITEYLRKNIAQLQPDMEAHYPGAHEELKLMETLMYSRPRKVLVEQTKNEYFELKANLHAEPDYLEVLEQQT

SEQ ID NO: 656 - protein, 83 aa, Artificial Sequence
  Synthetic Construct
KNSLKEANHDGDFGITLAELRALMELRSTDALRKIQESYGDVYGICTKLKTSPNEGLSGNPADLERREAVFGKNFIPPKKPKT

SEQ ID NO: 657 - protein, 83 aa, Artificial Sequence
  Synthetic Construct
YNCLDFPAGVVPVTTVTAEDEAQMEHYRGYFGDIWDKMLQKGMKKSVGLPVAVQCVALPWQEELCLRFMREVERLMTPEKQSS

SEQ ID NO: 658 - protein, 84 aa, Artificial Sequence
  Synthetic Construct
PAFDLLSRKMLGCPINDLNVILLFLRANISELISFSWLSVLCVLKDTTTQKHNIDTVVDFMTLLAGLEPSKPKHLTNSACDEHP

SEQ ID NO: 659 - protein, 85 aa, Artificial Sequence
  Synthetic Construct
SRRFQAAFQNVISSFHKQWHSQHDPQLPPAQRNIFLTECHFVELTEDIGPQFPCQSSMHNSHLPAALSSEQMSRTNYQSFHFNKT

SEQ ID NO: 660 - protein, 80 aa, Artificial Sequence
  Synthetic Construct
ELKTTRFHPNRQSSMYTVTRMESMTVVFDPNDADTTRSSRKKRATPRDPSFNGCSRRNSKSASATSSFISSPYTSVDEYS

SEQ ID NO: 661 - protein, 85 aa, Artificial Sequence
  Synthetic Construct
SRQCKQFAKDLLDQTRSSRELEIILNYRDDNSLIEEQSGNDLARLKLAIKYRQKEFVAQPNCQQLLASRWYDEFPGWRRRHWAVK

SEQ ID NO: 662 - protein, 86 aa, Artificial Sequence
  Synthetic Construct
VRKKQKAQHRCMRRVGRTGSRRSGYAFSHQEGFGELIMSGKNMRLSSLALSSFTTRSSSSWIESLRRKKSDSASSPSGGADKPLKG

SEQ ID NO: 663 - protein, 86 aa, Artificial Sequence
  Synthetic Construct
LLKLMFVNPPELPEQTTKALPVRFLFTDYNRLSSVGGETSLAEMIATLSDACEREFGFLATRLFRVFKTEDTQGKKKWKKTCCLPS

SEQ ID NO: 664 - protein, 86 aa, Artificial Sequence
  Synthetic Construct
PPYLGKLDVSFQRACQCEGKDNRIPLLKEVFEAFPNTPINIDIKVNNNVLIKKVSELVKRYNREHLTVWGNANYEIVEKCYKENSD

SEQ ID NO: 665 - protein, 86 aa, Artificial Sequence
  Synthetic Construct
VVAAMQARHAHVPQLRWETMDVRKLDFPSASFDVVLEKGTLDALLAGERDPWTVSSEGVHTVDQVLSEVGFQKGTRQLLGSRTQLE

SEQ ID NO: 666 - protein, 86 aa, Artificial Sequence
  Synthetic Construct
SAEVQAVLRKFDELDAVMSRLPHHSESRQEHERISRIHEEFKKKKNDPTFLEKKERCDYLKNKLSHIKQRIQEYDKVMNWDVQGYS

SEQ ID NO: 667 - protein, 86 aa, Artificial Sequence
  Synthetic Construct
AERVKELPSAGLVHYNFCTLPKRQFAPSYESRRQNQDRINKTVLYGTPRKCFVGQSKPNHPLLQAKPQSEPDYLEVLEKQTAISQL

SEQ ID NO: 668 - protein, 59 aa, Artificial Sequence
  Synthetic Construct
NLPPNPKRQQRKPKGNKNSILATEQEITYAELNLQKASQDFQGNDKTYHCKDLPSAPEK

SEQ ID NO: 669 - protein, 88 aa, Artificial Sequence
  Synthetic Construct
EKPESRTSIHNFMAHPEFRIEDSQPHIPLIDDTDLEEDAALKQNSSPPSSLNKNNSAIDSGINLTTDTSKSATSSSPGSPIHSLETSL

SEQ ID NO: 670 - protein, 88 aa, Artificial Sequence
  Synthetic Construct
EKPESRSSIHNFMTHPEFRIEDSEPHIPLIDDTDAEDDAPTKRNSSPPPSPNKNNNAVDSGIHLTIEMNKSATSSSPGSPLHSLETSL

SEQ ID NO: 671 - protein, 88 aa, Artificial Sequence
  Synthetic Construct
QGDPQRSPSSCNDLYATVKDFEKTPNSTLPPAGRPSEEPEPDYEAIQTLNREEEKATLGTNGHHGLVPKENDYESISDLQQGRDITRL

SEQ ID NO: 672 - protein, 89 aa, Artificial Sequence
  Synthetic Construct
KVAMIEPGYFKTAVTSKERFLKSFLEIWDRSSPEVKEAYGEKFVADYKKSAEQMEQKCTQDLSLVTNCMEHALIACHPRTRYSAGWDAK

SEQ ID NO: 673 - protein, 91 aa, Artificial Sequence
  Synthetic Construct
EKPESKTSIHNFMATPEFLINDYTHNIPLIDDTDVDENEERLRAPPPPSPNQNNNAIDSGIYLTTHVTKSATSSVFSSSPGSPLHSVETSL

SEQ ID NO: 674 - protein, 91 aa, Artificial Sequence
  Synthetic Construct
PAAPLAGPALPARRLSRASRPLSASQPSLPHGAPGPAASTRPASSSTPRLGPTPAARAAAPSPDRRDSASPGAAGGLDPQDSARSRLSSNL

SEQ ID NO: 675 - protein, 92 aa, Artificial Sequence
  Synthetic Construct
SKHFRKGFRTICAGLLGRAPGRASGRVCAAARGTHSGSVLERESSDLLHMSEAAGALRPCPGASQPCILEPCPGPSWQGPKAGDSILTVDVA

SEQ ID NO: 676 - protein, 92 aa, Artificial Sequence
  Synthetic Construct
SNAKIAYKQNKANTAQEQQYGSHEENLPADLEALQREIRMAQERLDLAVQAYSHQNNPHGPREKKAKVGSKAGSNKSTASSKSGDGKTSVWI

SEQ ID NO: 677 - protein, 94 aa, Artificial Sequence
  Synthetic Construct
QNEEESGEPEQAAGDAPPPYSSISAESAAYFDYKDESGFPKPPSYNVATTLPSYDEAERTKAEATIPLVPGRDEDFVGRDDFDDADQLRIGNDG

SEQ ID NO: 678 - protein, 94 aa, Artificial Sequence
  Synthetic Construct
EGDPQTQLQDDKDPMLILRGRVPEGRALDSEVDPDPEGDLGVRGPVFGEPSAPPHTSGVSLGESRSSEVDVSDLGSRNYSARTDFYCLVSKDDM

SEQ ID NO: 679 - protein, 95 aa, Artificial Sequence
  Synthetic Construct
LLGDFLRACFVRFMNYCWCWDLEAGFPSYAEFDISGNVLGLIFNQGMIWMGSFYAPGLVGINVLRLLTSMYFQCWAVMSSNVPHERVFKASRSNN

SEQ ID NO: 680 - protein, 96 aa, Artificial Sequence
  Synthetic Construct
TIEPVQQAGCSATRLPGDGQTSAGDASLQDPPSYPPVQVIRARVSSGSSSEVSSINSDLEWDPEDVNLEGSKENVELLGSQVHQDSVRTAHLSDDD

SEQ ID NO: 681 - protein, 96 aa, Artificial Sequence
  Synthetic Construct
RRTLKQAFADCTVILCEHRIEAMLECQQFLVIEENKVRQYDSIQKLLNERSLFRQAISPSDRVKLFPHRNSSKCKSKPQIAALKEETEEEVQDTRL

SEQ ID NO: 682 - protein, 99 aa, Artificial Sequence
  Synthetic Construct
VKAFHSSLHESIQKPYNQKSIHSFMTHPEFAIEEELPRTPLLDEEEEENPDKASKFGTRVLLLDGEVTPYANTNNNAVDCNQVQLPQSDSSLQSLETSV

SEQ ID NO: 683 - protein, 72 aa, Artificial Sequence
  Synthetic Construct
NLPKGKKPAPQAAEPNNHTEYASIQTSPQPASEDTLTYADLDMVHLNRTPKQPAPKPEPSFSEYASVQVPRK

SEQ ID NO: 684 - protein, 82 aa, Artificial Sequence
  Synthetic Construct
TLQLAGTSPQKATTKLSSAQVDQVEVEYVTMASLPKEDISYASLTLGAEDQEPTYCNMGHLSSHLPGRGPEEPTEYSTISRP

SEQ ID NO: 685 - protein, 311 aa, Artificial Sequence
  Synthetic Construct
ETGPKHIPLQTLLKFMVDIALGMEYLSNRNFLHRDLAARNCMLRDDMTVCVADFGLSKKIYSGDYYRQGRIAKMPVKWIAIESLADRVYTSKSDVWAFGVTMWEIATRGMTPYPGVQNHEMYDYLLHGHRLKQPEDCLDELYEIMYSCWRTDPLDRPTFSVLRLQLEKLLESLPDVRNQADVIYVNTQLLESSEGLAQGSTLAPLDLNIDPDSIIASCTPRAAISVVTAEVHDSKPHEGRYILNGGSEEWEDLTSAPSAAVTAEKNSVLPGERLVRNGVSWSHSSMLPLGSSLPDELLFADDSSEGSEVLM

SEQ ID NO: 686 - protein, 7 aa, Artificial Sequence
  Synthetic Construct
KEEEMAD

SEQ ID NO: 687 - protein, 12 aa, Artificial Sequence
  Synthetic Construct
NFHGMNPSKDTS

SEQ ID NO: 688 - protein, 14 aa, Artificial Sequence
  Synthetic Construct
HFHKVQPQEPKVTD

SEQ ID NO: 689 - protein, 15 aa, Artificial Sequence
  Synthetic Construct
ELIKPHRAAKGAPTS

SEQ ID NO: 690 - protein, 17 aa, Artificial Sequence
  Synthetic Construct
SFQMVKPWDSRGQEATD

SEQ ID NO: 691 - protein, 17 aa, Artificial Sequence
  Synthetic Construct
QVSSAESHKDLGKKDTE

SEQ ID NO: 692 - protein, 18 aa, Artificial Sequence
  Synthetic Construct
SFSEMKSREPKDQEAPST

SEQ ID NO: 693 - protein, 18 aa, Artificial Sequence
  Synthetic Construct
SFQGLRLWEPADQEAPST

SEQ ID NO: 694 - protein, 18 aa, Artificial Sequence
  Synthetic Construct
NLPKGKKPAPQAAEPNNH

SEQ ID NO: 695 - protein, 19 aa, Artificial Sequence
  Synthetic Construct
NHSVIGPNSRLARNVKEAP

SEQ ID NO: 696 - protein, 19 aa, Artificial Sequence
  Synthetic Construct
DFQWREKTPEPPVPCVPEQ

SEQ ID NO: 697 - protein, 20 aa, Artificial Sequence
  Synthetic Construct
DHLALSRPRRLSTADPADAS

SEQ ID NO: 698 - protein, 29 aa, Artificial Sequence
  Synthetic Construct
SPTNNTVYASVTHSNRETEIWTPRENDTI

SEQ ID NO: 699 - protein, 42 aa, Artificial Sequence
  Synthetic Construct
DGLRDRRSFHGPYTVQAGLPLNPMGRTGLRGRGSLSCFGPNH

SEQ ID NO: 700 - protein, 55 aa, Artificial Sequence
  Synthetic Construct
MRIKMCLIKLCKSKAKSCENDLEMGMLNSKFKKTRYQAGMRNSENLTANNTLSKP

SEQ ID NO: 701 - protein, 57 aa, Artificial Sequence
  Synthetic Construct
QDLKGDDTAVRDAHSKRDTKCQPQGSSGEEKGTPTTLRGGEASERKRPDSGCSTSKD

SEQ ID NO: 702 - protein, 69 aa, Artificial Sequence
  Synthetic Construct
KQQMEKGPIDAITGEARYSLSEDKLIRQQIDYKTLTLHCVCPENEGSAQVPVKVLNCDSITQAKDKLLD

SEQ ID NO: 703 - protein, 73 aa, Artificial Sequence
  Synthetic Construct
TLQLAGTSPQKATTKLSSAQVDQVEVEYVTMASLPKEDISYASLTLGAEDQEPTYCNMGHLSSHLPGRGPEEP

SEQ ID NO: 704 - protein, 95 aa, Artificial Sequence
  Synthetic Construct
EDDSDVEWKFARSKLWLSYFDDGKTLPPPFSLVPSPKSFVYFIMRIVNFPKCRRRRLQKDIEMGMGNSKSRLNLFTQSNSRVFESHSFNSILNQP

SEQ ID NO: 705 - protein, 100 aa, Artificial Sequence
  Synthetic Construct
RKVPSFTFTPTVTYQRGGEAVSSGGRPGLLNISEPAAQPWLADTWPNTGNNHNDCSISCCTAGNGNSDSNLTTYSRPADCIANYNNQLDNKQTNLMLPES

SEQ ID NO: 706 - protein, 110 aa, Artificial Sequence
  Synthetic Construct
GDQPVYLPTQMLVKFMADIASGMEYLSTKRFIHRDLAARNCMLNENMSVCVADFGLSKKIYNGDYYRQGRIAKMPVKWIAIESLADRVYTSKSDVWSFGVTMWEIATRGQ

SEQ ID NO: 707 - protein, 110 aa, Artificial Sequence
  Synthetic Construct
ETGPKHIPLQTLLKFMVDIALGMEYLSNRNFLHRDLAARNCMLRDDMTVCVADFGLSKKIYSGDYYRQGRIAKMPVKWIAIESLADRVYTSKSDVWAFGVTMWEIATRGM

SEQ ID NO: 708 - protein, 113 aa, Artificial Sequence
  Synthetic Construct
FEFCDLGDLKAYLRSEQEHMRGDSQTMLLQRMACEVAAGLAAMHKLHFLHSDLALRNCFLTSDLNVKVGDYGIGFSRYKEDYIETDDKKVFPLRWTAPELVTSFQDRLLTADQ

SEQ ID NO: 709 - protein, 142 aa, Artificial Sequence
  Synthetic Construct
LEAPVGREARKWLQLAVFCSPLVPGQSHLQLRIYFLNNTPCALQWALTNEQPHGGRLRGPCQLFDFNGARGDQCLKLTYISEGWENVDDSSCQLVPHLHIWHGKCPFRSFCFRRKAADENEDCSALTNEIIVTMHTFQDGLE

SEQ ID NO: 710 - protein, 146 aa, Artificial Sequence
  Synthetic Construct
QRSLYDRPASYKKKSMLDSEVKNLLSDDNSEGLTLLDLLSFTYQVARGMEFLASKNCVHRDLAARNVLLAQGKIVKICDFGLARDIMHDSNYVSKGSTFLPVKWMAPESIFDNLYTTLSDVWSYGILLWEIFSLGGTPYPGMMVDS

SEQ ID NO: 711 - protein, 152 aa, Artificial Sequence
  Synthetic Construct
KECAGEPLFSLFCAIKQQMEKGPIDAITGEARYSLSEDKLIRQQIDYKTLVLSCVSPDNANSPEVPVKILNCDTITQVKEKILDAIFKNVPCSHRPKAADMDLEWRQGSGARMILQDEDITTKIENDWKRLNTLAHYQVPDGSVVALVSKQV

SEQ ID NO: 712 - protein, 204 aa, Artificial Sequence
  Synthetic Construct
TVTESYTTSDTLKPSVHVHDNRPASNVVVTERVVGPISGADLHGMLEMPDLRDGSNVIVTERVIAPSSSLPTSLTIHHPRESSNVVVTERVIQPTSGMIGSLSMHPELANAHNVIVTERVVSGAGVTGISGTTGISGGIGSSGLVGTSMGAGSGALSGAGISGGGIGLSSLGGTASIGHMRSSSDHHFNQTIGSASPSTARSRI

SEQ ID NO: 713 - protein, 213 aa, Artificial Sequence
  Synthetic Construct
NPEYFSAADVYVPDEWEVAREKITMSRELGQGSFGMVYEGVAKGVVKDEPETRVAIKTVNEAASMRERIEFLNEASVMKEFNCHHVVRLLGVVSQGQPTLVIMELMTRGDLKSYLRSLRPEMENNPVLAPPSLSKMIQMAGEIADGMAYLNANKFVHRDLAARNCMVAEDFTVKIGDFGMTRDIYETDYYRKGGKGLLPVRWMSPESLKDGVF

SEQ ID NO: 714 - protein, 351 aa, Artificial Sequence
  Synthetic Construct
GGAYVGPTQNRILRLSKELGIETYKVNVSERLVQYVKGKTYPFRGAFPPVWNPIAYLDYNNLWRTIDNMGKEIPTDAPWEAQHADKWDKMTMKELIDKICWTKTARRFAYLFVNINVTSEPHEVSALWFLWYVKQCGGTTRIFSVTNGGQERKFVGGSGQVSERIMDLLGDQVKLNHPVTHVDQSSDNIIIETLNHEHYECKYVINAIPPTLTAKIHFRPELPAERNQLIQRLPMGAVIKCMMYYKEAFWKKKDYCGCMIIEDEDAPISITLDDTKPDGSLPAIMGFILARKADRLAKLHKEIRKKKICELYAKVLGSQEALHPVHYEEKNWCEEQYSGGCYTAYFPPGIM

SEQ ID NO: 715 - protein, 351 aa, Artificial Sequence
  Synthetic Construct
GGSYVGPTQNRILRLAKELGLETYKVNEVERLIHHVKGKSYPFRGPFPPVWNPITYLDHNNFWRTMDDMGREIPSDAPWKAPLAEEWDNMTMKELLDKLCWTESAKQLATLFVNLCVTAETHEVSALWFLWYVKQCGGTTRIISTTNGGQERKFVGGSGQVSERIMDLLGDRVKLERPVIYIDQTRENVLVETLNHEMYEAKYVISAIPPTLGMKIHFNPPLPMMRNQMITRVPLGSVIKCIVYYKEPFWRKKDYCGTMIIDGEEAPVAYTLDDTKPEGNYAAIMGFILAHKARKLARLTKEERLKKLCELYAKVLGSLEALEPVHYEEKNWCEEQYSGGCYTTYFPPGIL

SEQ ID NO: 716 - protein, 755 aa, Artificial Sequence
  Synthetic Construct
KGKKFIVVCGNITVDSVTAFLRNFLRDKSGEINTEIVFLGETPPSLELETIFKCYLAYTTFISGSAMKWEDLRRVAVESAEACLIIANPLCSDSHAEDISNIMRVLSIKNYDSTTRIIIQILQSHNKVYLPKIPSWNWDTGDNIICFAELKLGFIAQGCLVPGLCTFLTSLFVEQNKKVMPKQTWKKHFLNSMKNKILTQRLSDDFAGMSFPEVARLCFLKMHLLLIAIEYKSLFTDGFCGLILNPPPQVRIRKNTLGFFIAETPKDVRRALFYCSVCHDDVFIPELITNCGCKSRSRQHITVPSVKRMKKCLKGISSRISGQDSPPRVSASTSSISNFTTRTLQHDVEQDSDQLDSSGMFHWCKPTSLDKVTLKRTGKSKYKFRNHIVACVFGDAHSAPMGLRNFVMPLRASNYTRKELKDIVFIGSLDYLQREWRFLWNFPQIYILPGCALYSGDLHAANIEQCSMCAVLSPPPQPSSNQTLVDTEAIMATLTIGSLQIDSSSDPSPSVSEETPGYTNGHNEKSNCRKVPILTELKNPSNIHFIEQLGGLEGSLQETNLHLSTAFSTGTVFSGSFLDSLLATAFYNYHVLELLQMLVTGGVSSQLEQHLDKDKVYGVADSCTSLLSGRNRCKLGLLSLHETILSDVNPRNTFGQLFCGSLDLFGILCVGLYRIIDEEELNPENKRFVITRPANEFKLLPSDLVFCAIPFSTACYKRNEEFSLQKSYEIVNKASQTTETHSDTNCPPTIDSVTE

SEQ ID NO: 717 - protein, 905 aa, Artificial Sequence
  Synthetic Construct
ASLIRGNRSNCALFSTNLDWLVSKLDRLEASSGILEVLYCVLIESPEVLNIIQENHIKSIISLLDKHGRNHKVLDVLCSLCVCNGVAVRSNQDLITENLLPGRELLLQTNLINYVTSIRPNIFVGRAEGTTQYSKWYFEVMVDEVTPFLTAQATHLRVGWALTEGYTPYPGAGEGWGGNGVGDDLYSYGFDGLHLWTGHVARPVTSPGQHLLAPEDVISCCLDLSVPSISFRINGCPVQGVFESFNLDGLFFPVVSFSAGVKVRFLLGGRHGEFKFLPPPGYAPCHEAVLPRERLHLEPIKEYRREGPRGPHLVGPSRCLSHTDFVPCPVDTVQIVLPPHLERIREKLAENIHELWALTRIEQGWTYGPVRDDNKRLHPCLVDFHSLPEPERNYNLQMSGETLKTLLALGCHVGMADEKAEDNLKKTKLPKTYMMSNGYKPAPLDLSHVRLTPAQTTLVDRLAENGHNVWARDRVGQGWSYSAVQDIPARRNPRLVPYRLLDEATKRSNRDSLCQAVRTLLGYGYNIEPPDQEPSQVENQSRCDRVRIFRAEKSYTVQSGRWYFEFEAVTTGEMRVGWARPELRPDVELGADELAYVFNGHRGQRWHLGSEPFGRPWQPGDVVGCMIDLTENTIIFTLNGEVLMSDSGSETAFREIEIGDGFLPVCSLGPGQVGHLNLGQDVSSLRFFAICGLQEGFEPFAINMQRPVTTWFSKGLPQFEPVPLEHPHYEVSRVDGTVDTPPCLRLTHRTWGSQNSLVEMLFLRLSLPVQFHQHFRCTAGATPLAPPGLQPPAEDEARAAEPDPDYENLRRSAGGWSEAENGKEGTAKEGAPGGTPQAGGEAQPARAENEKDATTEKNKKRGFLFKAKKVAMMTQPPATPTLPRLPHDVVPADNRDDPEIILNTT

SEQ ID NO: 718 - protein, 5 aa, Artificial Sequence
  Synthetic Construct
NLMSY

SEQ ID NO: 719 - protein, 6 aa, Artificial Sequence
  Synthetic Construct
SRFKRQ

SEQ ID NO: 720 - protein, 7 aa, Artificial Sequence
  Synthetic Construct
MDDSDTP

SEQ ID NO: 721 - protein, 7 aa, Artificial Sequence
  Synthetic Construct
YGKKRNR

SEQ ID NO: 722 - protein, 7 aa, Artificial Sequence
  Synthetic Construct
KSQWIKE

SEQ ID NO: 723 - protein, 8 aa, Artificial Sequence
  Synthetic Construct
CRGLAPEE

SEQ ID NO: 724 - protein, 8 aa, Artificial Sequence
  Synthetic Construct
RLCSAMKQ

SEQ ID NO: 725 - protein, 9 aa, Artificial Sequence
  Synthetic Construct
YRKREWIKE

SEQ ID NO: 726 - protein, 11 aa, Artificial Sequence
  Synthetic Construct
RKMKRSSSEIK

SEQ ID NO: 727 - protein, 13 aa, Artificial Sequence
  Synthetic Construct
FCNMRRPAHADIK

SEQ ID NO: 728 - protein, 13 aa, Artificial Sequence
  Synthetic Construct
LRTVKRANGGELK

SEQ ID NO: 729 - protein, 14 aa, Artificial Sequence
  Synthetic Construct
MEQHVGIDVLKRDP

SEQ ID NO: 730 - protein, 14 aa, Artificial Sequence
  Synthetic Construct
LEQHVDPHVLQNKP

SEQ ID NO: 731 - protein, 14 aa, Artificial Sequence
  Synthetic Construct
RNKDVKDAIRKIIN

SEQ ID NO: 732 - protein, 15 aa, Artificial Sequence
  Synthetic Construct
VDFRPPPQGPSGPEV

SEQ ID NO: 733 - protein, 16 aa, Artificial Sequence
  Synthetic Construct
DRYFALVQPFRLTRWR

SEQ ID NO: 734 - protein, 17 aa, Artificial Sequence
  Synthetic Construct
VRMTSEIETNIVAVERI

SEQ ID NO: 735 - protein, 20 aa, Artificial Sequence
  Synthetic Construct
MERLWGLFQRAQQLSPRSSQ

SEQ ID NO: 736 - protein, 26 aa, Artificial Sequence
  Synthetic Construct
MAEPQAESEPLLGGARGGGGDWPAGL

SEQ ID NO: 737 - protein, 27 aa, Artificial Sequence
  Synthetic Construct
PETKGVALPETMKDAENLGRKAKPKEN

SEQ ID NO: 738 - protein, 27 aa, Artificial Sequence
  Synthetic Construct
MEDEAVLDRGASFLKHVCDEEEVEGHH

SEQ ID NO: 739 - protein, 35 aa, Artificial Sequence
  Synthetic Construct
YKMYGSEMLHKRDPLDEDEDTDISYKKLKEEEMAD

SEQ ID NO: 740 - protein, 49 aa, Artificial Sequence
  Synthetic Construct
RHVSDLHGLTELILLPPPCPASFNADEDDRVDILGPQPESHQQLSASSH

SEQ ID NO: 741 - protein, 54 aa, Artificial Sequence
  Synthetic Construct
CSRAARGTIGARRTGQPLKEDPSAVPVFSVDYGELDFQWREKTPEPPVPCVPEQ

SEQ ID NO: 742 - protein, 55 aa, Artificial Sequence
  Synthetic Construct
RRKSIKKKRALRRFLETELVEPLTPSGTAPNQAQLRILKETELKRVKVLGSGAFG

SEQ ID NO: 743 - protein, 56 aa, Artificial Sequence
  Synthetic Construct
RIRQKKAQGSTSSTRLHEPEKNAREITQDTNDITYADLNLPKGKKPAPQAAEPNNH

SEQ ID NO: 744 - protein, 57 aa, Artificial Sequence
  Synthetic Construct
AVTISLAYSVKKMMKDNNLVRHLDACETMGNATAICSDKTGTLTTNRMTVVQSYLGD

SEQ ID NO: 745 - protein, 57 aa, Artificial Sequence
  Synthetic Construct
CCRKKRREEKYEKEVHHDIREDVPPPKSRTSTARSYIGSNHSSLGSMSPSNMEGYSK

SEQ ID NO: 746 - protein, 57 aa, Artificial Sequence
  Synthetic Construct
KRRQQKIRKYTMRRLLQETELVEPLTPSGAMPNQAQMRILKETELRKVKVLGSGAFG

SEQ ID NO: 747 - protein, 61 aa, Artificial Sequence
  Synthetic Construct
KYLQKPMYEVQWKVVEEINGNNYVYIDPTQLPYDHKWEFPRNRLSFGKTLGAGAFGKVVEA

SEQ ID NO: 748 - protein, 64 aa, Artificial Sequence
  Synthetic Construct
YTTYPLLKESALILLQTVPKQIDIRNLIKELRNVEGVEEVHELHVWQLAGSRIIATAHIKCEDP

SEQ ID NO: 749 - protein, 70 aa, Artificial Sequence
  Synthetic Construct
AANAIAQSCQPSFYDGTIIVKKLPYLPRILGRNIGSHHVRVEHFMNHSITTLAKDTPLEEVVKVVTSTDV

SEQ ID NO: 750 - protein, 71 aa, Artificial Sequence
  Synthetic Construct
WLHRRLPPQPIRPLPRFAPLVKTEPQRPVKEEEPKIPGDLDQEPSLLYADLDHLALSRPRRLSTADPADAS

SEQ ID NO: 751 - protein, 72 aa, Artificial Sequence
  Synthetic Construct
KKYQPYKVIKQKLEGRPETEYRKAQTFSGHEDALDDFGIYEFVAFPDVSGVSRIPSRSVPASDCVSGQDLHS

SEQ ID NO: 752 - protein, 72 aa, Artificial Sequence
  Synthetic Construct
MDEINNKIEEEKLVKANITLWEANMIKAYNASFSENSTGPPFFVHPADVPRGPCWETMVGQEFVRLTVSDVL

SEQ ID NO: 753 - protein, 73 aa, Artificial Sequence
  Synthetic Construct
KTHRRKAARTAVGRNDTHPTTGSASPKHQKKSKLHGPTETSSCSGAAPTVEMDEELHYASLNFHGMNPSKDTS

SEQ ID NO: 754 - protein, 75 aa, Artificial Sequence
  Synthetic Construct
RVKTRRKKAAQPVQNTDDVNPVMVSGSRGHQHQFQTGIVSDHPAEAGPISEDEQELHYAVLHFHKVQPQEPKVTD

SEQ ID NO: 755 - protein, 79 aa, Artificial Sequence
  Synthetic Construct
IVLRRRRKRVNTKRSSRAFRAHLRAPLKGNCTHPEDMKLCTVIMKSNGSFPVNRRRVEAARRAQELEMEMLSSTSPPER

SEQ ID NO: 756 - protein, 79 aa, Artificial Sequence
  Synthetic Construct
KARRKQAAGRPEKMDDEDPIMGTITSGSRKKPWPDSPGDQASPPGDAPPLEEQKELHYASLSFSEMKSREPKDQEAPST

SEQ ID NO: 757 - protein, 81 aa, Artificial Sequence
  Synthetic Construct
KICRKEARKRAAAEQDVPSTLGPISQGHQHECSAGSSQDHPPPGAATYTPGKGEEQELHYASLSFQGLRLWEPADQEAPST

SEQ ID NO: 758 - protein, 84 aa, Artificial Sequence
  Synthetic Construct
QRVVCQRYAGANGPFPHEYVSGTPHVPLNFIAPGGSQHGPFTGIACGKSMMSSVSLMGGRGGVPLYDRNHVTGASSSSSSSTKA

SEQ ID NO: 759 - protein, 84 aa, Artificial Sequence
  Synthetic Construct
VRSCRKKSARPAAGVGDTGIEDANAVRGSASQGPLTEPWAEDSPPDQPPPASARSSVGEGELQYASLSFQMVKPWDSRGQEATD

SEQ ID NO: 760 - protein, 86 aa, Artificial Sequence
  Synthetic Construct
FVAKIARPKNRAFSIRFTDTAVVAHMDGKPNLIFQVANTRPSPLTSVRVSAVLYQERENGKLYQTSVDFHLDGISSDECPFFIFPL

SEQ ID NO: 761 - protein, 66 aa, Artificial Sequence
  Synthetic Construct
QLRRRGKTNHYQTTVEKKSLTIYAQVQKPGPLQKKLDSFPAQDPCTTIYVAATEPVPESVQETNSI

SEQ ID NO: 762 - protein, 89 aa, Artificial Sequence
  Synthetic Construct
ILAKISRPKKRAKTITFSKNAVISKRGGKLCLLIRVANLRKSLLIGSHIYGKLLKTTVTPEGETIILDQININFVVDAGNENLFFISPL

SEQ ID NO: 763 - protein, 89 aa, Artificial Sequence
  Synthetic Construct
FLAKIARPKKRAETIRFSQHAVVASHNGKPCLMIRVANMRKSLLIGCQVTGKLLQTHQTKEGENIRLNQVNVTFQVDTASDSPFLILPL

SEQ ID NO: 764 - protein, 54 aa, Artificial Sequence
  Synthetic Construct
WFLKRERQEEYIEEKKRVDICRETPNICPHSGENTEYDTIPHTNRTILKEDPAN

SEQ ID NO: 765 - protein, 90 aa, Artificial Sequence
  Synthetic Construct
KCYFLRKAKAKQMPVEMSRPAVPLLNSNNEKMSDPNMEANSHYGHNDDVRNHAMKPINDNKEPLNSDVQYTEVQVSSAESHKDLGKKDTE

SEQ ID NO: 766 - protein, 59 aa, Artificial Sequence
  Synthetic Construct
LRKRRDSLSLSTQRTQGPAESARNLEYVSVSPTNNTVYASVTHSNRETEIWTPRENDTI

SEQ ID NO: 767 - protein, 67 aa, Artificial Sequence
  Synthetic Construct
RLFKRRQGRIFPEGSCLNTFTKNPYAASKKTIYTYIMASRNTQPAESRIYDEILQSKVLPSKEEPVN

SEQ ID NO: 768 - protein, 101 aa, Artificial Sequence
  Synthetic Construct
RRHQGKQNELSDTAGREINLVDAHLKSEQTEASTRQNSQVLLSETGIYDNDPDLCFRMQEGSEVYSNPCLEENKPGIVYASLNHSVIGPNSRLARNVKEAP

SEQ ID NO: 769 - protein, 102 aa, Artificial Sequence
  Synthetic Construct
KYRHKRFAVSEQGNIPHSHDWVWLGNEVELLENPVDITLPSEECTTMIDRGLQFEERNFLLNGSSQKTFHSQLLRPSDYVYEKEIKNEPMNSSGPKRKRVKF

SEQ ID NO: 770 - protein, 102 aa, Artificial Sequence
  Synthetic Construct
NSSYQEIEDDSDVEWKFARSKLWLSYFDDGKTLPPPFSLVPSPKSFVYFIMRIVNFPKCRRRRLQKDIEMGMGNSKSRLNLFTQSNSRVFESHSFNSILNQP

SEQ ID NO: 771 - protein, 104 aa, Artificial Sequence
  Synthetic Construct
WRMMKYQQKAAGMSPEQVLQPLEGDLCYADLTLQLAGTSPQKATTKLSSAQVDQVEVEYVTMASLPKEDISYASLTLGAEDQEPTYCNMGHLSSHLPGRGPEEP

SEQ ID NO: 772 - protein, 105 aa, Artificial Sequence
  Synthetic Construct
NNSYQEIEEDADVEWKFARAKLWLSYFDEGRTLPAPFNLVPSPKSFYYLIMRIKMCLIKLCKSKAKSCENDLEMGMLNSKFKKTRYQAGMRNSENLTANNTLSKP

SEQ ID NO: 773 - protein, 106 aa, Artificial Sequence
  Synthetic Construct
QSVFNKRKSRVRHYLVKCPQNSSGETVTSVTSLAPLQPKKGKRQKEKPDIPPAVPAKAPIAPTFHKPKLLKPQRKVTLPKIAEENLTYAELELIKPHRAAKGAPTS

SEQ ID NO: 774 - protein, 117 aa, Artificial Sequence
  Synthetic Construct
YRHRKKRNGLTSTYAGIRKVPSFTFTPTVTYQRGGEAVSSGGRPGLLNISEPAAQPWLADTWPNTGNNHNDCSISCCTAGNGNSDSNLTTYSRPADCIANYNNQLDNKQTNLMLPES

SEQ ID NO: 775 - protein, 123 aa, Artificial Sequence
  Synthetic Construct
RYQRWKSKLYSIVCGKSTPEKEGELEGTTTKPLAPNPSFSPTPGFTPTLGFSPVPSSTFTSSSTYTPGDCPNFAAPRREVAPPYQGADPILATALASDPIPNPLQKWEDSAHKPQSLDTDDPA

SEQ ID NO: 776 - protein, 133 aa, Artificial Sequence
  Synthetic Construct
VRLRLQKHRPPADPCRGETETMNNLANCQREKDISVSIIGATQIKNTNKKADFHGDHSADKNGFKARYPAVDYNLVQDLKGDDTAVRDAHSKRDTKCQPQGSSGEEKGTPTTLRGGEASERKRPDSGCSTSKD

SEQ ID NO: 777 - protein, 135 aa, Artificial Sequence
  Synthetic Construct
RAWVVFKLSSAPRLHEQRVRDIQKQVREWKEQGSKTFMCTGRPGWLTVSLRVGKYKKTHKNIMINLMDILEVDTKKQIVRVEPLVTMGQVTALLTSIGWTLPVLPELDDLTVGGLIMGTGIESSSHKYGLFQHIC

SEQ ID NO: 778 - protein, 148 aa, Artificial Sequence
  Synthetic Construct
TRDLVDDMGRHKSDRAINNRPCQILMGKSFKQKKWQDLCVGDVVCLRKDNIVPADMLLLASTEPSSLCYVETVDIDGETNLKFRQALMVTHKELATIKKMASFQGTVTCEAPNSRMHHFVGCLEWNDKKYSLDIGNLLLRGCRIRNTD

SEQ ID NO: 779 - protein, 162 aa, Artificial Sequence
  Synthetic Construct
VFDPLGGKMAPYSSAGPSHLDSHDSSQLLNGLKTAATSVWETRIKLLCCCIGKDDHTRVAFSSTAELFSTYFSDTDLVPSDIAAGLALLHQQQDNIRNNQEPAQVVCHAPGSSQEADLDAELENCHHYMQFAAAAYGWPLYIYRNPLTGLCRIGGDCCRSRT

SEQ ID NO: 780 - protein, 89 aa, Artificial Sequence
  Synthetic Construct
WRRKRKEKQSETSPKEFLTIYEDVKDLKTRRNHEQEQTFPGGGSTIYSMIQSQSSAPTSQEPAYTLYSLIQPSRKSGSRKRNHSPSFNS

SEQ ID NO: 781 - protein, 230 aa, Artificial Sequence
  Synthetic Construct
RKRNNSRLGNGVLYASVNPEYFSAADVYVPDEWEVAREKITMSRELGQGSFGMVYEGVAKGVVKDEPETRVAIKTVNEAASMRERIEFLNEASVMKEFNCHHVVRLLGVVSQGQPTLVIMELMTRGDLKSYLRSLRPEMENNPVLAPPSLSKMIQMAGEIADGMAYLNANKFVHRDLAARNCMVAEDFTVKIGDFGMTRDIYETDYYRKGGKGLLPVRWMSPESLKDGVF

SEQ ID NO: 782 - protein, 238 aa, Artificial Sequence
  Synthetic Construct
NKCGRRNKFGINRPAVLAPEDGLAMSLHFMTLGGSSLSPTEGKGSGLQGHIIENPQYFSDACVHHIKRRDIVLKWELGEGAFGKVFLAECHNLLPEQDKMLVAVKALKEASESARQDFQREAELLTMLQHQHIVRFFGVCTEGRPLLMVFEYMRHGDLNRFLRSHGPDAKLLAGGEDVAPGPLGLGQLLAVASQVAAGMVYLAGLHFVHRDLATRNCLVGQGLVVKIGDFGMSRDIYS

SEQ ID NO: 783 - protein, 249 aa, Artificial Sequence
  Synthetic Construct
KLARHSKFGMKGPASVISNDDDSASPLHHISNGSNTPSSSEGGPDAVIIGMTKIPVIENPQYFGITNSQLKPDTFVQHIKRHNIVLKRELGEGAFGKVFLAECYNLCPEQDKILVAVKTLKDASDNARKDFHREAELLTNLQHEHIVKFYGVCVEGDPLIMVFEYMKHGDLNKFLRAHGPDAVLMAEGNPPTELTQSQMLHIAQQIAAGMVYLASQHFVHRDLATRNCLVGENLLVKIGDFGMSRDVYS

SEQ ID NO: 784 - protein, 263 aa, Artificial Sequence
  Synthetic Construct
NCVSCCKDPEIDFKEFEDNFDDEIDFTPPAEDTPSVQSPAEVFTLSVPNISLPAPSQFQPSVEGLKSQVARHSLNYIQEIGNGWFGKVLLGEIYTGTSVARVIVKELKASANPKEQDTFLKNGEPYYILQHPNILQCVGQCVEAIPYLLVFEFCDLGDLKAYLRSEQEHMRGDSQTMLLQRMACEVAAGLAAMHKLHFLHSDLALRNCFLTSDLNVKVGDYGIGFSRYKEDYIETDDKKVFPLRWTAPELVTSFQDRLLTADQ

SEQ ID NO: 785 - protein, 271 aa, Artificial Sequence
  Synthetic Construct
YKRKTQDADRTLKRLQLQMDNLESRVALECKEAFAELQTDINELTNHMDEVQIPFLDYRTYAVRVLFPGIEAHPVLKELDTPPNVEKALRLFGQLLHSRAFVLTFIHTLEAQSSFSMRDRGTVASLTMVALQSRLDYATGLLKQLLADLIEKNLESKNHPKLLLRRTESVAEKMLTNWFTFLLHKFLKECAGEPLFLLYCAIKQQMEKGPIDAITGEARYSLSEDKLIRQQIDYKTLTLHCVCPENEGSAQVPVKVLNCDSITQAKDKLLD

SEQ ID NO: 786 - protein, 147 aa, Artificial Sequence
  Synthetic Construct
KRKGRCSVPAFCSSQAEAPADTPEPTAGHTLYSVLSQGYEKLDTPLRPARQQPTPTSDSSSDSNLTTEEDEDRPEVHKPISGRYEVFDQVTQEGAGHDPAPEGQADYDPVTPYVTEVESVVGENTMYAQVFNLQGKTPVSQKEESSA

SEQ ID NO: 787 - protein, 272 aa, Artificial Sequence
  Synthetic Construct
KRVQETKFGNAFTEEDSELVVNYIAKKSFCRRAIELTLHSLGVSEELQNKLEDVVIDRNLLILGKILGEGEFGSVMEGNLKQEDGTSLKVAVKTMKLDNSSQREIEEFLSEAACMKDFSHPNVIRLLGVCIEMSSQGIPKPMVILPFMKYGDLHTYLLYSRLETGPKHIPLQTLLKFMVDIALGMEYLSNRNFLHRDLAARNCMLRDDMTVCVADFGLSKKIYSGDYYRQGRIAKMPVKWIAIESLADRVYTSKSDVWAFGVTMWEIATRGM

SEQ ID NO: 788 - protein, 277 aa, Artificial Sequence
  Synthetic Construct
SRQQRRREARGRGDASGLKRNSERKTPEGRASPAPGSGHPEGPGAHLDMNSLDRAQAAKNKGNKYFKAGKYEQAIQCYTEAISLCPTEKNVDLSTFYQNRAAAFEQLQKWKEVAQDCTKAVELNPKYVKALFRRAKAHEKLDNKKECLEDVTAVCILEGFQNQQSMLLADKVLKLLGKEKAKEKYKNREPLMPSPQFIKSYFSSFTDDIISQPMLKGEKSDEDKDKEGEALEVKENSGYLKAKQYMEEENYDKIISECSKEIDAEGKYMAEALLLRA

SEQ ID NO: 789 - protein, 280 aa, Artificial Sequence
  Synthetic Construct
LRKRRKETRFGQAFDSVMARGEPAVHFRAARSFNRERPERIEATLDSLGISDELKEKLEDVLIPEQQFTLGRMLGKGEFGSVREAQLKQEDGSFVKVAVKMLKADIIASSDIEEFLREAACMKEFDHPHVAKLVGVSLRSRAKGRLPIPMVILPFMKHGDLHAFLLASRIGENPFNLPLQTLIRFMVDIACGMEYLSSRNFIHRDLAARNCMLAEDMTVCVADFGLSRKIYSGDYYRQGCASKLPVKWLALESLADNLYTVQSDVWAFGVTMWEIMTRGQ

SEQ ID NO: 790 - protein, 275 aa, Artificial Sequence
  Synthetic Construct
HRRKKETRYGEVFEPTVERGELVVRYRVRKSYSRRTTEATLNSLGISEELKEKLRDVMVDRHKVALGKTLGEGEFGAVMEGQLNQDDSILKVAVKTMKIAICTRSELEDFLSEAVCMKEFDHPNVMRLIGVCFQGSERESFPAPVVILPFMKHGDLHSFLLYSRLGDQPVYLPTQMLVKFMADIASGMEYLSTKRFIHRDLAARNCMLNENMSVCVADFGLSKKIYNGDYYRQGRIAKMPVKWIAIESLADRVYTSKSDVWSFGVTMWEIATRGQ

SEQ ID NO: 791 - protein, 285 aa, Artificial Sequence
  Synthetic Construct
KRIELDDSISASSSSQGLSQPSTQTTQYLRADTPNNATPITSYPTLRIEKNDLRSVTLLEAKGKVKDIAISRERITLKDVLQEGTFGRIFHGILIDEKDPNKEKQAFVKTVKDQASEIQVTMMLTESCKLRGLHHRNLLPITHVCIEEGEKPMVILPYMNWGNLKLFLRQCKLVEANNPQAISQQDLVHMAIQIACGMSYLARREVIHKDLAARNCVIDDTLQVKITDNALSRDLFPMDYHCLGDNENRPVRWMALESLVNNEFSSASDVWAFGVTLWELMTLGQ

SEQ ID NO: 792 - protein, 293 aa, Artificial Sequence
  Synthetic Construct
NCRTWWQVLDSLLNSQRKRLHNAASKLHKLKSEGFMKVLKCEVELMARMAKTIDSFTQNQTRLVVIIDGLDACEQDKVLQMLDTVRVLFSKGPFIAIFASDPHIIIKAINQNLNSVLRDSNINGHDYMRNIVHLPVFLNSRGLSNARKFLVTSATNGDVPCSDTTGIQEDADRRVSQNSLGEMTKLGSKTALNRRDTYRRRQMQRTITRQMSFDLTKLLVTEDWFSDISPQTMRRLLNIVSVTGRLLRANQISFNWDRLASWINLTEQWPYRTSWLILYLEETEGIPDQMTLK

SEQ ID NO: 793 - protein, 300 aa, Artificial Sequence
  Synthetic Construct
MFNYTFQQVQEHTDQIWKFQRHDLIEEYHGRPAAPPPFILLSHLQLFIKRVVLKTPAKRHKQLKNKLEKNEEAALLSWEIYLKENYLQNRQFQQKQRPEQKIEDISNKVDAMVDLLDLDPLKRSGSMEQRLASLEEQVAQTAQALHWIVRTLRASGFSSEADVPTLASQKAAEEPDAEPGGRKKTEEPGDSYHVNARHLLYPNCPVTRFPVPNEKVPWETEFLIYDPPFYTAERKDAAAMDPMGDTLEPLSTIQYNVVDGLRDRRSFHGPYTVQAGLPLNPMGRTGLRGRGSLSCFGPNH

SEQ ID NO: 794 - protein, 344 aa, Artificial Sequence
  Synthetic Construct
AYKRKSRESDLTLKRLQMQMDNLESRVALECKEAFAELQTDIHELTSDLDGAGIPFLDYRTYTMRVLFPGIEDHPVLRDLEVPGYRQERVEKGLKLFAQLINNKVFLLSFIRTLESQRSFSMRDRGNVASLIMTVLQSKLEYATDVLKQLLADLIDKNLESKNHPKLLLRRTESVAEKMLTNWFTFLLYKFLKECAGEPLFSLFCAIKQQMEKGPIDAITGEARYSLSEDKLIRQQIDYKTLVLSCVSPDNANSPEVPVKILNCDTITQVKEKILDAIFKNVPCSHRPKAADMDLEWRQGSGARMILQDEDITTKIENDWKRLNTLAHYQVPDGSVVALVSKQV

SEQ ID NO: 795 - protein, 345 aa, Artificial Sequence
  Synthetic Construct
RWHCPRRLLGACWTLNGQEEPVSQPTPQLENEVSRQHLPATLPEMVAFYQELHTPTQGQTMVRQLMHKLLVFSAREVDHRGGCLMLQDTGISLLIPPGAVAVGRQERVSLILVWDLSDAPSLSQAQGLVSPVVACGPHGASFLKPCTLTFKHCAEQPSHARTYSSNTTLLDAKVWRPLGRPGAHASRDECRIHLSHFSLYTCVLEAPVGREARKWLQLAVFCSPLVPGQSHLQLRIYFLNNTPCALQWALTNEQPHGGRLRGPCQLFDFNGARGDQCLKLTYISEGWENVDDSSCQLVPHLHIWHGKCPFRSFCFRRKAADENEDCSALTNEIIVTMHTFQDGLE

SEQ ID NO: 796 - protein, 354 aa, Artificial Sequence
  Synthetic Construct
KQKPRYEIRWRVIESISPDGHEYIYVDPMQLPYDSRWEFPRDGLVLGRVLGSGAFGKVVEGTAYGLSRSQPVMKVAVKMLKPTARSSEKQALMSELKIMTHLGPHLNIVNLLGACTKSGPIYIITEYCFYGDLVNYLHKNRDSFLSHHPEKPKKELDIFGLNPADESTRSYVILSFENNGDYMDMKQADTTQYVPMLERKEVSKYSDIQRSLYDRPASYKKKSMLDSEVKNLLSDDNSEGLTLLDLLSFTYQVARGMEFLASKNCVHRDLAARNVLLAQGKIVKICDFGLARDIMHDSNYVSKGSTFLPVKWMAPESIFDNLYTTLSDVWSYGILLWEIFSLGGTPYPGMMVDS

SEQ ID NO: 797 - protein, 377 aa, Artificial Sequence
  Synthetic Construct
CCCKQRQPEGLGTRFAPVPEGGEGVMQSWRIEGAHPEDRDVSNICAPMTASNTQDRMDSSEIYTNTYAAGGTVEGGVSGVELNTGMGTAVGLMAAGAAGASGAARKRSSTMGTLRDYADADINMAFLDSYFSEKAYAYADEDEGRPANDCLLIYDHEGVGSPVGSIGCCSWIVDDLDESCMETLDPKFRTLAEICLNTEIEPFPSHQACIPISTDLPLLGPNYFVNESSGLTPSEVEFQEEMAASEPVVHGDIIVTETYGNADPCVQPTTIIFDPQLAPNVVVTEAVMAPVYDIQGNICVPAELADYNNVIYAERVLASPGVPDMSNSSTTEGCMGPVMSGNILVGPEIQVMQMMSPDLPIGQTVGSTSPMTSRHRV

SEQ ID NO: 798 - protein, 406 aa, Artificial Sequence
  Synthetic Construct
SNKCDVVVVGGGISGMAAAKLLHDSGLNVVVLEARDRVGGRTYTLRNQKVKYVDLGGSYVGPTQNRILRLAKELGLETYKVNEVERLIHHVKGKSYPFRGPFPPVWNPITYLDHNNFWRTMDDMGREIPSDAPWKAPLAEEWDNMTMKELLDKLCWTESAKQLATLFVNLCVTAETHEVSALWFLWYVKQCGGTTRIISTTNGGQERKFVGGSGQVSERIMDLLGDRVKLERPVIYIDQTRENVLVETLNHEMYEAKYVISAIPPTLGMKIHFNPPLPMMRNQMITRVPLGSVIKCIVYYKEPFWRKKDYCGTMIIDGEEAPVAYTLDDTKPEGNYAAIMGFILAHKARKLARLTKEERLKKLCELYAKVLGSLEALEPVHYEEKNWCEEQYSGGCYTTYFPPGIL

SEQ ID NO: 799 - protein, 416 aa, Artificial Sequence
  Synthetic Construct
MENQEKASIAGHMFDVVVIGGGISGLSAAKLLTEYGVSVLVLEARDRVGGRTYTIRNEHVDYVDVGGAYVGPTQNRILRLSKELGIETYKVNVSERLVQYVKGKTYPFRGAFPPVWNPIAYLDYNNLWRTIDNMGKEIPTDAPWEAQHADKWDKMTMKELIDKICWTKTARRFAYLFVNINVTSEPHEVSALWFLWYVKQCGGTTRIFSVTNGGQERKFVGGSGQVSERIMDLLGDQVKLNHPVTHVDQSSDNIIIETLNHEHYECKYVINAIPPTLTAKIHFRPELPAERNQLIQRLPMGAVIKCMMYYKEAFWKKKDYCGCMIIEDEDAPISITLDDTKPDGSLPAIMGFILARKADRLAKLHKEIRKKKICELYAKVLGSQEALHPVHYEEKNWCEEQYSGGCYTAYFPPGIM

SEQ ID NO: 800 - protein, 470 aa, Artificial Sequence
  Synthetic Construct
CCDCGGAPRSAAGFEPVPECSDGAIHSWAVEGPQPEPRDITTVIPQIPPDNANIIECIDNSGVYTNEYGGREMQDLGGGERMTGFELTEGVKTSGMPEICQEYSGTLRRNSMRECREGGLNMNFMESYFCQKAYAYADEDEGRPSNDCLLIYDIEGVGSPAGSVGCCSFIGEDLDDSFLDTLGPKFKKLADISLGKESYPDLDPSWPPQSTEPVCLPQETEPVVSGHPPISPHFGTTTVISESTYPSGPGVLHPKPILDPLGYGNVTVTESYTTSDTLKPSVHVHDNRPASNVVVTERVVGPISGADLHGMLEMPDLRDGSNVIVTERVIAPSSSLPTSLTIHHPRESSNVVVTERVIQPTSGMIGSLSMHPELANAHNVIVTERVVSGAGVTGISGTTGISGGIGSSGLVGTSMGAGSGALSGAGISGGGIGLSSLGGTASIGHMRSSSDHHFNQTIGSASPSTARSRI

SEQ ID NO: 801 - protein, 534 aa, Artificial Sequence
  Synthetic Construct
NLEGVMNQADAPRPLNWTIRKLCHAAFLPSVRLLKAQKSWIERAFYKRECVHIIPSTKDPHRCCCGRLIGQHVGLTPSISVLQNEKNESRLSRNDIQSEKWSISKHTQLSPTDAFGTIEFQGGGHSNKAMYVRVSFDTKPDLLLHLMTKEWQLELPKLLISVHGGLQNFELQPKLKQVFGKGLIKAAMTTGAWIFTGGVNTGVIRHVGDALKDHASKSRGKICTIGIAPWGIVENQEDLIGRDVVRPYQTMSNPMSKLTVLNSMHSHFILADNGTTGKYGAEVKLRRQLEKHISLQKINTRCLPFFSLDSRLFYSFWGSCQLDSVGIGQGVPVVALIVEGGPNVISIVLEYLRDTPPVPVVVCDGSGRASDILAFGHKYSEEGGLINESLRDQLLVTIQKTFTYTRTQAQHLFIILMECMKKKELITVFRMGSEGHQDIDLAILTALLKGANASAPDQLSLALAWNRVDIARSQIFIYGQQWPVGSLEQAMLDALVLDRVDFVKLLIENGVSMHRFLTISRLEELYNTRHGPSN

SEQ ID NO: 802 - protein, 771 aa, Artificial Sequence
  Synthetic Construct
ELFANKRKYTSSYEALKGKKFIVVCGNITVDSVTAFLRNFLRDKSGEINTEIVFLGETPPSLELETIFKCYLAYTTFISGSAMKWEDLRRVAVESAEACLIIANPLCSDSHAEDISNIMRVLSIKNYDSTTRIIIQILQSHNKVYLPKIPSWNWDTGDNIICFAELKLGFIAQGCLVPGLCTFLTSLFVEQNKKVMPKQTWKKHFLNSMKNKILTQRLSDDFAGMSFPEVARLCFLKMHLLLIAIEYKSLFTDGFCGLILNPPPQVRIRKNTLGFFIAETPKDVRRALFYCSVCHDDVFIPELITNCGCKSRSRQHITVPSVKRMKKCLKGISSRISGQDSPPRVSASTSSISNFTTRTLQHDVEQDSDQLDSSGMFHWCKPTSLDKVTLKRTGKSKYKFRNHIVACVFGDAHSAPMGLRNFVMPLRASNYTRKELKDIVFIGSLDYLQREWRFLWNFPQIYILPGCALYSGDLHAANIEQCSMCAVLSPPPQPSSNQTLVDTEAIMATLTIGSLQIDSSSDPSPSVSEETPGYTNGHNEKSNCRKVPILTELKNPSNIHFIEQLGGLEGSLQETNLHLSTAFSTGTVFSGSFLDSLLATAFYNYHVLELLQMLVTGGVSSQLEQHLDKDKVYGVADSCTSLLSGRNRCKLGLLSLHETILSDVNPRNTFGQLFCGSLDLFGILCVGLYRIIDEEELNPENKRFVITRPANEFKLLPSDLVFCAIPFSTACYKRNEEFSLQKSYEIVNKASQTTETHSDTNCPPTIDSVTE

SEQ ID NO: 803 - protein, 813 aa, Artificial Sequence
  Synthetic Construct
QFEELVYLWMERQKSGGNYSRHRAQTEKHVVLCVSSLKIDLLMDFLNEFYAHPRLQDYYVVILCPTEMDVQVRRVLQIPLWSQRVIYLQGSALKDQDLMRAKMDNGEACFILSSRNEVDRTAADHQTILRAWAVKDFAPNCPLYVQILKPENKFHVKFADHVVCEEECKYAMLALNCICPATSTLITLLVHTSRGQEGQESPEQWQRMYGRCSGNEVYHIRMGDSKFFREYEGKSFTYAAFHAHKKYGVCLIGLKREDNKSILLNPGPRHILAASDTCFYINITKEENSAFIFKQEEKRKKRAFSGQGLHEGPARLPVHSIIASMGTVAMDLQGTEHRPTQSGGGGGGSKLALPTENGSGSRRPSIAPVLELADSSALLPCDLLSDQSEDEVTPSDDEGLSVVEYVKGYPPNSPYIGSSPTLCHLLPVKAPFCCLRLDKGCKHNSYEDAKAYGFKNKLIIVSAETAGNGLYNFIVPLRAYYRSRKELNPIVLLLDNKPDHHFLEAICCFPMVYYMEGSVDNLDSLLQCGIIYADNLVVVDKESTMSAEEDYMADAKTIVNVQTMFRLFPSLSITTELTHPSNMRFMQFRAKDSYSLALSKLEKRERENGSNLAFMFRLPFAAGRVFSISMLDTLLYQSFVKDYMITITRLLLGLDTTPGSGYLCAMKITEGDLWIRTYGRLFQKLCSSSAEIPIGIYRTESHVFSTSESQISVNVEDCEDTREVKGPWGSRAGTGGSSQGRHTGGGDPAEHPLLRRKSLQWARRLSRKAPKQAGRAAAAEWISQQRLSLYRRSERQELSELVKNRMKHLGLPT

SEQ ID NO: 804 - protein, 1202 aa, Artificial Sequence
  Synthetic Construct
MSGGASATGPRRGPPGLEDTTSKKKQKDRANQESKDGDPRKETGSRYVAQAGLEPLASGDPSASASHAAGITGSRHRTRLFFPSSSGSASTPQEEQTKEGACEDPHDLLATPTPELLLDWRQSAEEVIVKLRVGVGPLQLEDVDAAFTDTDCVVRFAGGQQWGGVFYAEIKSSCAKVQTRKGSLLHLTLPKKVPMLTWPSLLVEADEQLCIPPLNSQTCLLGSEENLAPLAGEKAVPPGNDPVSPAMVRSRNPGKDDCAKEEMAVAADAATLVDEPESMVNLAFVKNDSYEKGPDSVVVHVYVKEICRDTSRVLFREQDFTLIFQTRDGNFLRLHPGCGPHTTFRWQVKLRNLIEPEQCTFCFTASRIDICLRKRQSQRWGGLEAPAARVGGAKVAVPTGPTPLDSTPPGGAPHPLTGQEEARAVEKDKSKARSEDTGLDSVATRTPMEHVTPKPETHLASPKPTCMVPPMPHSPVSGDSVEEEEEEEKKVCLPGFTGLVNLGNTCFMNSVIQSLSNTRELRDFFHDRSFEAEINYNNPLGTGGRLAIGFAVLLRALWKGTHHAFQPSKLKAIVASKASQFTGYAQHDAQEFMAFLLDGLHEDLNRIQNKPYTETVDSDGRPDEVVAEEAWQRHKMRNDSFIVDLFQGQYKSKLVCPVCAKVSITFDPFLYLPVPLPQKQKVLPVFYFAREPHSKPIKFLVSVSKENSTASEVLDSLSQSVHVKPENLRLAEVIKNRFHRVFLPSHSLDTVSPSDTLLCFELLSSELAKERVVVLEVQQRPQVPSVPISKCAACQRKQQSEDEKLKRCTRCYRVGYCNQLCQKTHWPDHKGLCRPENIGYPFLVSVPASRLTYARLAQLLEGYARYSVSVFQPPFQPGRMALESQSPGCTTLLSTGSLEAGDSERDPIQPPELQLVTPMAEGDTGLPRVWAAPDRGPVPSTSGISSEMLASGPIEVGSLPAGERVSRPEAAVPGYQHPSEAMNAHTPQFFIYKIDSSNREQRLEDKGDTPLELGDDCSLALVWRNNERLQEFVLVASKELECAEDPGSAGEAARAGHFTLDQCLNLFTRPEVLAPEEAWYCPQCKQHREASKQLLLWRLPNVLIVQLKRFSFRSFIWRDKINDLVEFPVRNLDLSKFCIGQKEEQLPSYDLYAVINHYGGMIGGHYTACARLPNDRSSQRSDVGWRLFDDSTVTTVDESQVV

SEQ ID NO: 805 - protein, 1424 aa, Artificial Sequence
  Synthetic Construct
MADGGEGEDEIQFLRTDDEVVLQCTATIHKEQQKLCLAAEGFGNRLCFLESTSNSKNVPPDLSICTFVLEQSLSVRALQEMLANTVEKSEGQVDVEKWKFMMKTAQGGGHRTLLYGHAILLRHSYSGMYLCCLSTSRSSTDKLAFDVGLQEDTTGEACWWTIHPASKQRSEGEKVRVGDDLILVSVSSERYLHLSYGNGSLHVDAAFQQTLWSVAPISSGSEAAQGYLIGGDVLRLLHGHMDECLTVPSGEHGEEQRRTVHYEGGAVSVHARSLWRLETLRVAWSGSHIRWGQPFRLRHVTTGKYLSLMEDKNLLLMDKEKADVKSTAFTFRSSKEKLDVGVRKEVDGMGTSEIKYGDSVCYIQHVDTGLWLTYQSVDVKSVRMGSIQRKAIMHHEGHMDDGISLSRSQHEESRTARVIRSTVFLFNRFIRGLDALSKKAKASTVDLPIESVSLSLQDLIGYFHPPDEHLEHEDKQNRLRALKNRQNLFQEEGMINLVLECIDRLHVYSSAAHFADVAGREAGESWKSILNSLYELLAALIRGNRKNCAQFSGSLDWLISRLERLEASSGILEVLHCVLVESPEALNIIKEGHIKSIISLLDKHGRNHKVLDVLCSLCVCHGVAVRSNQHLICDNLLPGRDLLLQTRLVNHVSSMRPNIFLGVSEGSAQYKKWYYELMVDHTEPFVTAEATHLRVGWASTEGYSPYPGGGEEWGGNGVGDDLFSYGFDGLHLWSGCIARTVSSPNQHLLRTDDVISCCLDLSAPSISFRINGQPVQGMFENFNIDGLFFPVVSFSAGIKVRFLLGGRHGEFKFLPPPGYAPCYEAVLPKEKLKVEHSREYKQERTYTRDLLGPTVSLTQAAFTPIPVDTSQIVLPPHLERIREKLAENIHELWVMNKIELGWQYGPVRDDNKRQHPCLVEFSKLPEQERNYNLQMSLETLKTLLALGCHVGISDEHAEDKVKKMKLPKNYQLTSGYKPAPMDLSFIKLTPSQEAMVDKLAENAHNVWARDRIRQGWTYGIQQDVKNRRNPRLVPYTLLDDRTKKSNKDSLREAVRTLLGYGYNLEAPDQDHAARAEVCSGTGERFRIFRAEKTYAVKAGRWYFEFETVTAGDMRVGWSRPGCQPDQELGSDERAFAFDGFKAQRWHQGNEHYGRSWQAGDVVGCMVDMNEHTMMFTLNGEILLDDSGSELAFKDFDVGDGFIPVCSLGVAQVGRMNFGKDVSTLKYFTICGLQEGYEPFAVNTNRDITMWLSKRLPQFLQVPSNHEHIEVTRIDGTIDSSPCLKVTQKSFGSQNSNTDIMFYRLSMPIECAEVFSKTVAGGLPGAGLFGPKNDLEDYDADSDFEVLMKTAHGHLVPDRVDKDKEATKPEFNNHKDYAQEKPSRLKQRFLLRRTKPDYSTSHSARLTEDVLADDRDDYDFLMQTS

SEQ ID NO: 806 - protein, 4 aa, Artificial Sequence
  Synthetic Construct
KIHK

SEQ ID NO: 807 - protein, 4 aa, Artificial Sequence
  Synthetic Construct
KTSK

SEQ ID NO: 808 - protein, 4 aa, Artificial Sequence
  Synthetic Construct
KIHR

SEQ ID NO: 809 - protein, 4 aa, Artificial Sequence
  Synthetic Construct
CVRS

SEQ ID NO: 810 - protein, 4 aa, Artificial Sequence
  Synthetic Construct
QYSK

SEQ ID NO: 811 - protein, 7 aa, Artificial Sequence
  Synthetic Construct
LFEENKL

SEQ ID NO: 812 - protein, 15 aa, Artificial Sequence
  Synthetic Construct
KAENIIMMETAQTSL

SEQ ID NO: 813 - protein, 16 aa, Artificial Sequence
  Synthetic Construct
YVISEEKDECVIATEV

SEQ ID NO: 814 - protein, 19 aa, Artificial Sequence
  Synthetic Construct
NHSKESKPTFSRATALDNV

SEQ ID NO: 815 - protein, 22 aa, Artificial Sequence
  Synthetic Construct
RKAVPDAVESRYSRTEGSLDGT

SEQ ID NO: 816 - protein, 27 aa, Artificial Sequence
  Synthetic Construct
KIHTGQPLRGPGFGLQLEREMSGMVPK

SEQ ID NO: 817 - protein, 37 aa, Artificial Sequence
  Synthetic Construct
VFPSGMGTSSPARRGSADGPRSAQPLRPEDGHCSWPL

SEQ ID NO: 818 - protein, 48 aa, Artificial Sequence
  Synthetic Construct
QTSPQPASEDTLTYADLDMVHLNRTPKQPAPKPEPSFSEYASVQVPRK

SEQ ID NO: 819 - protein, 60 aa, Artificial Sequence
  Synthetic Construct
YSYQPRTNSLSFPKQIAWNQSRTNSIISSQIPLGDNAKENERKTSDEVYDEDPFAYSEPL

SEQ ID NO: 820 - protein, 70 aa, Artificial Sequence
  Synthetic Construct
MKRLIKRYVLKAQVDKENDEVNEGELKEIKQDISSLRYELLEDKSQATEELAILIHKLSEKLNPSMLRCE

SEQ ID NO: 821 - protein, 75 aa, Artificial Sequence
  Synthetic Construct
IRQPVGRIFFAGTETATKWSGYMEGAVEAGERAAREVLNGLGKVTEKDIWVQEPESKDVPAVEITHTFWERNLPS

SEQ ID NO: 822 - protein, 76 aa, Artificial Sequence
  Synthetic Construct
LRQPVDRIYFAGTETATHWSGYMEGAVEAGERAAREILHAMGKIPEDEIWQSEPESVDVPAQPITTTFLERHLPSV

SEQ ID NO: 823 - protein, 79 aa, Artificial Sequence
  Synthetic Construct
MKRLIKRYVLKAQVDRENDEVNEGELKEIKQDISSLRYELLEEKSQATGELADLIQQLSEKFGKNLNKDHLRVNKGKDI

SEQ ID NO: 824 - protein, 83 aa, Artificial Sequence
  Synthetic Construct
LFYRRRNSPVERPPRAGHSEHHPDLGPAAEAAASQASRIWQELEAEEEPVPEGSGPLGPWGPQDWVGPLPRGPTTPDEGCLRY

SEQ ID NO: 825 - protein, 136 aa, Artificial Sequence
  Synthetic Construct
LRFQASEEESWAAPPPVSQPPPCNRLPPELFEQLRMLLEPNSITGNDWRRLASHLGLCGMKIRFLSCQRSPAAAILELFEEQNGSLQELHYLMTVMERLDCASAIQNYLSGTHGGSPGPERGGARDNQGLELDEKL

SEQ ID NO: 826 - protein, 141 aa, Artificial Sequence
  Synthetic Construct
ENSEIYDYLRQGNRLKQPADCLDGLYALMSRCWELNPQDRPSFTELREDLENTLKALPPAQEPDEILYVNMDEGGGYPEPPGAAGGADPPTQPDPKDSCSCLTAAEVHPAGRYVLCPSTTPSPAQPADRGSPAAPGQEDGA

SEQ ID NO: 827 - protein, 151 aa, Artificial Sequence
  Synthetic Construct
TRWRRNEDGAICRKSIKKMLEVLVVKLPLSEHWALPGGSREPGEMLPRKLKRILRQEHWPSFENLLKCGMEVYKGYMDDPRNTDNAWIETVAVSVHFQDQNDVELNRLNSNLHACDSGASIRWQVVDRRIPLYANHKTLLQKAAAEFGAHY

SEQ ID NO: 828 - protein, 172 aa, Artificial Sequence
  Synthetic Construct
WSFGVVLWEIATLAEQPYQGLSNEQVLRFVMEGGLLDKPDNCPDMLFELMRMCWQYNPKMRPSFLEIISSIKEEMEPGFREVSFYYSEENKLPEPEELDLEPENMESVPLDPSASSSSLPLPDRHSGHKAENGPGPGVLVLRASFDERQPYAHMNGGRKNERALPLPQSSTC

SEQ ID NO: 829 - protein, 180 aa, Artificial Sequence
  Synthetic Construct
KSGYRMAKPDHATSEVYEIMVKCWNSEPEKRPSFYHLSEIVENLLPGQYKKSYEKIHLDFLKSDHPAVARMRVDSDNAYIGVTYKNEEDKLKDWEGGLDEQRLSADSGYIIPLPDIDPVPEEEDLGKRNRHSSQTSEESAIETGSSSSTFIKREDETIEDIDMMDDIGIDSSDLVEDSFL

SEQ ID NO: 830 - protein, 195 aa, Artificial Sequence
  Synthetic Construct
QNHEMYDYLLHGHRLKQPEDCLDELYEIMYSCWRTDPLDRPTFSVLRLQLEKLLESLPDVRNQADVIYVNTQLLESSEGLAQGSTLAPLDLNIDPDSIIASCTPRAAISVVTAEVHDSKPHEGRYILNGGSEEWEDLTSAPSAAVTAEKNSVLPGERLVRNGVSWSHSSMLPLGSSLPDELLFADDSSEGSEVLM

SEQ ID NO: 831 - protein, 274 aa, Artificial Sequence
  Synthetic Construct
CETLQFLDCICGSTTGGLGLLGLYINEKNVALINQTLESLTEYCQGPCHENQNCIATHESNGIDIITALILNDINPLGKKRMDLVLELKNNASKLLLAIMESRHDSENAERILYNMRPKELVEVIKKAYMQGEVEFEDGENGEDGAASPRNVGHNIYILAHQLARHNKELQSMLKPGGQVDGDEALEFYAKHTAQIEIVRLDRTMEQIVFPVPSICEFLTKESKLRIYYTTERDEQGSKINDFFLRSEDLFNEMNWQKKLRAQPVLYWCARNMS

SEQ ID NO: 832 - protein, 275 aa, Artificial Sequence
  Synthetic Construct
CETLQFLDCICGSTTGGLGLLGLYINEKNVALVNQNLESLTEYCQGPCHENQTCIATHESNGIDIIIALILNDINPLGKYRMDLVLQLKNNASKLLLAIMESRHDSENAERILFNMRPRELVDVMKNAYNQGLECDHGDDEGGDDGVSPKDVGHNIYILAHQLARHNKLLQQMLKPGSDPDEGDEALKYYANHTAQIEIVRHDRTMEQIVFPVPNICEYLTRESKCRVFNTTERDEQGSKVNDFFQQTEDLYNEMKWQKKIRNNPALFWFSRHIS

SEQ ID NO: 833 - protein, 286 aa, Artificial Sequence
  Synthetic Construct
NNSTVSRTSASKYENMIRYTGSPDSLRSRTPMITPDLESGVKMWHLVKNHEHGDQKEGDRGSKMVSEIYLTRLLATKGTLQKFVDDLFETIFSTAHRGSALPLAIKYMFDFLDEQADKHGIHDPHVRHTWKSNCLPLRFWVNMIKNPQFVFDIHKNSITDACLSVVAQTFMDSCSTSEHRLGKDSPSNKLLYAKDIPSYKNWVERYYSDIGKMPAISDQDMNAYLAEQSRMHMNEFNTMSALSEIFSYVGKYSEEILGPLDHDDQCGKQKLAYKLEQVITLMSLDS

SEQ ID NO: 834 - protein, 298 aa, Artificial Sequence
  Synthetic Construct
CETLQFLDIMCGSTTGGLGLLGLYINEDNVGLVIQTLETLTEYCQGPCHENQTCIVTHESNGIDIITALILNDISPLCKYRMDLVLQLKDNASKLLLALMESRHDSENAERILISLRPQELVDVIKKAYLQEEERENSEVSPREVGHNIYILALQLSRHNKQLQHLLKPVKRIQEEEAEGISSMLSLNNKQLSQMLKSSAPAQEEEEDPLAYYENHTSQIEIVRQDRSMEQIVFPVPGICQFLTEETKHRLFTTTEQDEQGSKVSDFFDQSSFLHNEMEWQRKLRSMPLIYWFSRRMT

SEQ ID NO: 835 - protein, 353 aa, Artificial Sequence
  Synthetic Construct
PYSQRPKAEDMDLEWRQGRMTRIILQDEDVTTKIECDWKRLNSLAHYQVTDGSLVALVPKQVSAYNMANSFTFTRSLSRYESLLRTASSPDSLRSRAPMITPDQETGTKLWHLVKNHDHADHREGDRGSKMVSEIYLTRLLATKGTLQKFVDDLFETVFSTAHRGSALPLAIKYMFDFLDEQADQRQISDPDVRHTWKSNCLPLRFWVNVIKNPQFVFDIHKNSITDACLSVVAQTFMDSCSTSEHRLGKDSPSNKLLYAKDIPNYKSWVERYYRDIAKMASISDQDMDAYLVEQSRLHASDFSVLSALNELYFYVTKYRQEILTALDRDASCRKHKLRQKLEQIISLVSSDS

SEQ ID NO: 836 - protein, 610 aa, Artificial Sequence
  Synthetic Construct
DLSNKINEMKTFNSPNLKDGRFVNPSGQPTPYATTQLIQSNLSNNMNNGSGDSGEKHWKPLGQQKQEVAPVQYNIVEQNKLNKDYRANDTVPPTIPYNQSYDQNTGGSYNSSDRGSSTSGSQGHKKGARTPKVPKQGGMNWADLLPPPPAHPPPHSNSEEYNISVDESYDQEMPCPVPPARMYLQQDELEEEEDERGPTPPVRGAASSPAAVSYSHQSTATLTPSPQEELQPMLQDCPEETGHMQHQPDRRRQPVSPPPPPRPISPPHTYGYISGPLVSDMDTDAPEEEEDEADMEVAKMQTRRLLLRGLEQTPASSVGDLESSVTGSMINGWGSASEEDNISSGRSSVSSSDGSFFTDADFAQAVAAAAEYAGLKVARRQMQDAAGRRHFHASQCPRPTSPVSTDSNMSAAVMQKTRPAKKLKHQPGHLRRETYTDDLPPPPVPPPAIKSPTAQSKTQLEVRPVVVPKLPSMDARTDRSSDRKGSSYKGREVLDGRQVVDMRTNPGDPREAQEQQNDGKGRGNKAAKRDLPPAKTHLIQEDILPYCRPTFPTSNNPRDPSSSSSMSSRGSGSRQREQANVGRRNIAEMQVLGGYERGEDNNEELEETES

SEQ ID NO: 837 - protein, 4 aa, Artificial Sequence
  Synthetic Construct
KIHK

SEQ ID NO: 838 - protein, 4 aa, Artificial Sequence
  Synthetic Construct
KTSK

SEQ ID NO: 839 - protein, 4 aa, Artificial Sequence
  Synthetic Construct
KIHR

SEQ ID NO: 840 - protein, 4 aa, Artificial Sequence
  Synthetic Construct
CVRS

SEQ ID NO: 841 - protein, 4 aa, Artificial Sequence
  Synthetic Construct
QYSK

SEQ ID NO: 842 - protein, 5 aa, Artificial Sequence
  Synthetic Construct
HYTQQ

SEQ ID NO: 843 - protein, 7 aa, Artificial Sequence
  Synthetic Construct
LGPKPQG

SEQ ID NO: 844 - protein, 7 aa, Artificial Sequence
  Synthetic Construct
LFEENKL

SEQ ID NO: 845 - protein, 8 aa, Artificial Sequence
  Synthetic Construct
VKADTYCA

SEQ ID NO: 846 - protein, 8 aa, Artificial Sequence
  Synthetic Construct
QTSEPSGT

SEQ ID NO: 847 - protein, 10 aa, Artificial Sequence
  Synthetic Construct
QSCALPTDAL

SEQ ID NO: 848 - protein, 10 aa, Artificial Sequence
  Synthetic Construct
AKNALLRWRV

SEQ ID NO: 849 - protein, 10 aa, Artificial Sequence
  Synthetic Construct
SKNRLLSIKT

SEQ ID NO: 850 - protein, 12 aa, Artificial Sequence
  Synthetic Construct
QHIPAQQQDHPE

SEQ ID NO: 851 - protein, 14 aa, Artificial Sequence
  Synthetic Construct
AHHRFYTKRLTFWT

SEQ ID NO: 852 - protein, 14 aa, Artificial Sequence
  Synthetic Construct
AHHRFYAKRMTLWT

SEQ ID NO: 853 - protein, 14 aa, Artificial Sequence
  Synthetic Construct
KHRHWYPFNFVIEQ

SEQ ID NO: 854 - protein, 15 aa, Artificial Sequence
  Synthetic Construct
AHHRFYAERLAGWPC

SEQ ID NO: 855 - protein, 15 aa, Artificial Sequence
  Synthetic Construct
KAENIIMMETAQTSL

SEQ ID NO: 856 - protein, 16 aa, Artificial Sequence
  Synthetic Construct
YVISEEKDECVIATEV

SEQ ID NO: 857 - protein, 22 aa, Artificial Sequence
  Synthetic Construct
RKAVPDAVESRYSRTEGSLDGT

SEQ ID NO: 858 - protein, 27 aa, Artificial Sequence
  Synthetic Construct
KIHTGQPLRGPGFGLQLEREMSGMVPK

SEQ ID NO: 859 - protein, 30 aa, Artificial Sequence
  Synthetic Construct
IYAGFDTKIMKNCGKIHLKRTKLDLLMNKL

SEQ ID NO: 860 - protein, 31 aa, Artificial Sequence
  Synthetic Construct
ASALKSHRTRGHGRGDCCGRSLGDSCCFSAK

SEQ ID NO: 861 - protein, 36 aa, Artificial Sequence
  Synthetic Construct
FTLVLEEIRQGFFTDEDTHLVKKFTLYVGDNWNKCD

SEQ ID NO: 862 - protein, 37 aa, Artificial Sequence; identical to SEQ ID NO: 817
  Synthetic Construct

SEQ ID NO: 863 - protein, 44 aa, Artificial Sequence
  Synthetic Construct
PSEDFERTPQSPTLPPAKVAAPNLSRMGAIPVMIPAQSKDGSIV

SEQ ID NO: 864 - protein, 46 aa, Artificial Sequence
  Synthetic Construct
LPEDGGPYTNSILFDSDDNIKWVCQDMGLGDSQDFRDYMESLQDQM

SEQ ID NO: 865 - protein, 48 aa, Artificial Sequence; identical to SEQ ID NO: 818
  Synthetic Construct

SEQ ID NO: 866 - protein, 52 aa, Artificial Sequence
  Synthetic Construct
SYHASGHSVAYKPGGFKASTGFGSNTKNKKIYDGGARTEDEVQSYPSKHDYV

SEQ ID NO: 867 - protein, 52 aa, Artificial Sequence
  Synthetic Construct
QVGPGAAARWDLCIDQAVVFIEDAIQYRSINHRVDASSMWLYRRYYSNVCQR

SEQ ID NO: 868 - protein, 57 aa, Artificial Sequence
  Synthetic Construct
EGPRKGHLEEEEEDGEEGAETLAHFCPMELRGPEPLGSRPRQPNLIPWAAAGRRAAP

SEQ ID NO: 869 - protein, 51 aa, Artificial Sequence
  Synthetic Construct
QKPGPLQKKLDSFPAQDPCTTIYVAATEPVPESVQETNSITVYASVTLPES

SEQ ID NO: 870 - protein, 60 aa, Artificial Sequence; identical to SEQ ID NO: 819
  Synthetic Construct

SEQ ID NO: 871 - protein, 61 aa, Artificial Sequence
  Synthetic Construct
DPFEMAAYLKDGYRIAQPINCPDELFAVMACCWALDPEERPKFQQLVQCLTEFHAALGAYV

SEQ ID NO: 872 - protein, 43 aa, Artificial Sequence
  Synthetic Construct
THSNRETEIWTPRENDTITIYSTINHSKESKPTFSRATALDNV

SEQ ID NO: 873 - protein, 70 aa, Artificial Sequence; identical to SEQ ID NO: 820
  Synthetic Construct

SEQ ID NO: 874 - protein, 75 aa, Artificial Sequence
  Synthetic Construct
PPSHHQLTLPDPSHHGLHSTPDSPAKPEKNGHAKDHPKIAKIFEIQTMPNGKTRTSLKTMSRRKLSQQKEKKATQ

SEQ ID NO: 875 - protein, 75 aa, Artificial Sequence; identical to SEQ ID NO: 821
  Synthetic Construct

SEQ ID NO: 876 - protein, 49 aa, Artificial Sequence
  Synthetic Construct
FNLQGKTPVSQKEESSATIYCSIRKPQVVPPPQQNDLEIPESPTYENFT

SEQ ID NO: 877 - protein, 76 aa, Artificial Sequence; identical to SEQ ID NO: 822
  Synthetic Construct

SEQ ID NO: 878 - protein, 48 aa, Artificial Sequence
  Synthetic Construct
PHTNRTILKEDPANTVYSTVEIPKKMENPHSLLTMPDTPRLFAYENVI

SEQ ID NO: 879 - protein, 79 aa, Artificial Sequence; identical to SEQ ID NO: 823
  Synthetic Construct

SEQ ID NO: 880 - protein, 83 aa, Artificial Sequence; identical to SEQ ID NO: 824
  Synthetic Construct

SEQ ID NO: 881 - protein, 86 aa, Artificial Sequence
  Synthetic Construct
ANLTASDVMNRVNLGYLQDEMNDHQNTLSYVLINPPPDTRLEPSDIVYLIRSDPLAHVASSSQSRKSSCSHKLSSCNPETRDETQL

SEQ ID NO: 882 - protein, 63 aa, Artificial Sequence [sequence omitted]

SEQ ID NO: 883 - protein, 92 aa, Artificial Sequence
  Synthetic Construct
ENVPPLRWKEFVRRLGLSDHEIDRLELQNGRCLREAQYSMLATWRRRTPRREATLELLGRVLRDMDLLGCLEDIEEALCGPAALPPAPSLLR

SEQ ID NO: 884 - protein, 95 aa, Artificial Sequence
  Synthetic Construct
LIGDFLRACFVRFCNYCWCWDLEYGYPSYTEFDISGNVLALIFNQGMIWMGSFFAPSLPGINILRLHTSMYFQCWAVMCCNVPEARVFKASRSNN

SEQ ID NO: 885 - protein, 105 aa, Artificial Sequence
  Synthetic Construct
ESTESQILVGIVQRAQLVQALQAEPPSRAPGHQQCLQDILARGCPTEPVTLTLFSETTLHQAQNLFKLLNLQSLFVTSRGRAVGCVSWVEMKKAISNLTNPPAPK

SEQ ID NO: 886 - protein, 108 aa, Artificial Sequence
  Synthetic Construct
AKTIKDVFHNHGIHATTIQPEFASVGSKSSVVPCELACRTQCALKQCCGTLPQAPSGKDAEKTPAVSISCLELSNNLEKKPRRTKAENIPAVVIEIKNMPNKQPESSL

SEQ ID NO: 887 - protein, 113 aa, Artificial Sequence
  Synthetic Construct
TPSSPLATLLQHENPSHFELVVFLSAMQEGTGEICQRRTSYLPSEIMLHHCFASLLTRGSKGEYQIKMENFDKTVPEFPTPLVSKSPNRTDLDIHINGQSIDNFQISETGLTE

SEQ ID NO: 888 - protein, 113 aa, Artificial Sequence
  Synthetic Construct
GGRTMLPIRWMPPESILYRKFTTESDVWSFGVVLWEIFTYGKQPWYQLSNTEAIDCITQGRELERPRACPPEVYAIMRGCWQREPQQRHSIKDVHARLQALAQAPPVYLDVLG

SEQ ID NO: 889 - protein, 113 aa, Artificial Sequence
  Synthetic Construct
GGHTMLPIRWMPPESIMYRKFTTESDVWSLGVVLWEIFTYGKQPWYQLSNNEVIECITQGRVLQRPRTCPQEVYELMLGCWQREPHMRKNIKGIHTLLQNLAKASPVYLDILG

SEQ ID NO: 890 - protein, 118 aa, Artificial Sequence
  Synthetic Construct
LNPPPSPATDPSLYNMDMFYSSNIPATARPYRPYIIRGMAPPTTPCSTDVCDSDYSASRWKASKYYLDLNSDSDPYPPPPTPHSQYLSAEDSCPPSPATERSYFHLFPPPPSPCTDSS

SEQ ID NO: 891 - protein, 119 aa, Artificial Sequence
  Synthetic Construct
DHNSPFFHMAAETLLQQDFELVVFLDGTVESTSATCQVRTSYVPEEVLWGYRFAPIVSKTKEGKYRVDFHNFSKTVEVETPHCAMCLYNEKDVRARMKRGYDNPNFILSEVNETDDTKM

SEQ ID NO: 892 - protein, 120 aa, Artificial Sequence
  Synthetic Construct
DETSPLKDLPLRSGEGDFELVLILSGTVESTSATCQVRTSYLPEEILWGYEFTPAISLSASGKYIADFSLFDQVVKVASPSGLRDSTVRYGDPEKLKLEESLREQAEKEGSALSVRISNV

SEQ ID NO: 893 - protein, 136 aa, Artificial Sequence; identical to SEQ ID NO: 825
  Synthetic Construct

SEQ ID NO: 894 - protein, 151 aa, Artificial Sequence; identical to SEQ ID NO: 827
  Synthetic Construct

SEQ ID NO: 895 - protein, 154 aa, Artificial Sequence
  Synthetic Construct
ENAEIYNYLIGGNRLKQPPECMEDVYDLMYQCWSADPKQRPSFTCLRMELENILGQLSVLSASQDPLYINIERAEEPTAGGSLELPGRDQPYSGAGDGSGMGAVGGTPSDCRYILTPGGLAEQPGQAEHQPESPLNETQRLLLLQQGLLPHSSC

SEQ ID NO: 896 - protein, 172 aa, Artificial Sequence; identical to SEQ ID NO: 828
  Synthetic Construct

SEQ ID NO: 897 - protein, 180 aa, Artificial Sequence; identical to SEQ ID NO: 829
  Synthetic Construct

SEQ ID NO: 898 - protein, 195 aa, Artificial Sequence; identical to SEQ ID NO: 830
  Synthetic Construct

SEQ ID NO: 899 - protein, 205 aa, Artificial Sequence
  Synthetic Construct
PDPYKSSILSLIKFKENPHLIIMNVSDCIPDAIEVVSKPEGTKIQFLGTRKSLTETELTKPNYLYLLPTEKNHSGPGPCICFENLTYNQAASDSGSCGHVPVSPKAPSMLGLMTSPENVLKALEKNYMNSLGEIPAGETSLNYVSQLASPMFGDKDSLPTNPVEAPHCSEYKMQMAVSLRLALPPPTENSSLSSITLLDPGEHYC

SEQ ID NO: 900 - protein, 224 aa, Artificial Sequence
  Synthetic Construct
PNPENCKALQFQKSVCEGSSALKTLEMNPCTPNNVEVLETRSAFPKIEDTEIISPVAERPEDRSDAEPENHVVVSYCPPIIEEEIPNPAADEAGGTAQVIYIDVQSMYQPQAKPEEEQENDPVGGAGYKPQMHLPINSTVEDIAAEEDLDKTAGYRPQANVNTWNLVSPDSPRSIDSNSEIVSFGSPCSINSRQFLIPPKDEDSPKSNGGGWSFTNFFQNKPND

SEQ ID NO: 901 - protein, 230 aa, Artificial Sequence
  Synthetic Construct
RDVKKGNLPPDYRISLIDIGLVIEYLMGGAYRCNYTRKRFRTLYHNLFGPKRPKALKLLGMEDDIPLRRGRKTTKKREEEVDIDLDDPEINHFPFPFHELMVWAVLMKRQKMALFFWQHGEEAMAKALVACKLCKAMAHEASENDMVDDISQELNHNSRDFGQLAVELLDQSYKQDEQLAMKLLTYELKNWSNATCLQLAVAAKHRDFIAHTCSQMLLTDMWMGRLRMRK

SEQ ID NO: 902 - protein, 96 aa, Artificial Sequence
  Synthetic Construct
KDLKTRRNHEQEQTFPGGGSTIYSMIQSQSSAPTSQEPAYTLYSLIQPSRKSGSRKRNHSPSFNSTIYEVIGKSQPKAQNPARLSRKELENFDVYS

SEQ ID NO: 903 - protein, 266 aa, Artificial Sequence
  Synthetic Construct
GNANAAKPDLDKVISLKEANVKLRANALIKRGSMYMQQQQPLLSTQDFNMAADIDPQNADVYHHRGQLKILLDQVEEAVADFDECIRLRPESALAQAQKCFALYRQAYTGNNSSQIQAAMKGFEEVIKKFPRCAEGYALYAQALTDQQQFGKADEMYDKCIDLEPDNATTYVHKGLLQLQWKQDLDRGLELISKAIEIDNKCDFAYETMGTIEVQRGNMEKAIDMFNKAINLAKSEMEMAHLYSLCDAAHAQTEVAKKYGLKPPTL

SEQ ID NO: 904 - protein, 267 aa, Artificial Sequence
  Synthetic Construct
ENEAPWVTDKRPPPDWPSKGKIQFNNYQVRYRPELDLVLRGITCDIGSMEKIGVVGRTGAGKSSLTNCLFRILEAAGGQIIIDGVDIASIGLHDLREKLTIIPQDPILFSGSLRMNLDPFNNYSDEEIWKALELAHLKSFVASLQLGLSHEVTEAGGNLSIGQRQLLCLGRALLRKSKILVLDEATAAVDLETDNLIQTTIQNEFAHCTVITIAHRLHTIMDSDKVMVLDNGKIIECGSPEELLQIPGPFYFMAKEAGIENVNSTKF

SEQ ID NO: 905 - protein, 274 aa, Artificial Sequence; identical to SEQ ID NO: 831
  Synthetic Construct

SEQ ID NO: 906 - protein, 275 aa, Artificial Sequence; identical to SEQ ID NO: 832
  Synthetic Construct

SEQ ID NO: 907 - protein, 286 aa, Artificial Sequence; identical to SEQ ID NO: 833
  Synthetic Construct

SEQ ID NO: 908 - protein, 298 aa, Artificial Sequence; identical to SEQ ID NO: 834
  Synthetic Construct

SEQ ID NO: 909 - protein, 323 aa, Artificial Sequence
  Synthetic Construct
LADGSFVRCTPSENSDLFYAVPWSCGTLGFLVAAEIRIIPAKKYVKLRFEPVRGLEAICAKFTHESQRQENHFVEGLLYSLDEAVIMTGVMTDEAEPSKLNSIGNYYKPWFFKHVENYLKTNREGLEYIPLRHYYHRHTRSIFWELQDIIPFGNNPIFRYLFGWMVPPKISLLKLTQGETLRKLYEQHHVVQDMLVPMKCLQQALHTFQNDIHVYPIWLCPFILPSQPGLVHPKGNEAELYIDIGAYGEPRVKHFEARSCMRQLEKFVRSVHGFQMLYADCYMNREEFWEMFDGSLYHKLREKLGCQDAFPEVYDKICKAARH

SEQ ID NO: 910 - protein, 341 aa, Artificial Sequence
  Synthetic Construct
NPEYFSASDMYVPDEWEVPREQISIIRELGQGSFGMVYEGLARGLEAGEESTPVALKTVNELASPRECIEFLKEASVMKAFKCHHVVRLLGVVSQGQPTLVIMELMTRGDLKSHLRSLRPEAENNPGLPQPALGEMIQMAGEIADGMAYLAANKFVHRDLAARNCMVSQDFTVKIGDFGMTRDVYETDYYRKGGKGLLPVRWMAPESLKDGIFTTHSDVWSFGVVLWEIVTLAEQPYQGLSNEQVLKFVMDGGVLEELEGCPLQLQELMSRCWQPNPRLRPSFTHILDSIQEELRPSFRLLSFYYSPECRGARGSLPTTDAEPDSSPTPRDCSPQNGGPGH

SEQ ID NO: 911 - protein, 351 aa, Artificial Sequence
  Synthetic Construct
PAPSALTPKILDLLVHAISINSAYTTKILPPEKEGALPRQVGNKTECALLGFVLDLKRDFQPVREQIPEDKLYKVYTFNSVRKSMSTVIRMPDGGFRLFSKGASEILLKKCTNILNSNGELRGFRPRDRDDMVRKIIEPMACDGLRTICIAYRDFSAGQEPDWDNENEVVGDLTCIAVVGIEDPVRPEVPEAIRKCQRAGITVRMVTGDNINTARAIAAKCGIIQPGEDFLCLEGKEFNRRIRNEKGEIEQERLDKVWPKLRVLARSSPTDKHTLVKGIIDSTTGEQRQVVAVTGDGTNDGPALKKADVGFAMGIAGTDVAKEASDIILTDDNFTSIVKAVMWGRNVYDSI

SEQ ID NO: 912 - protein, 351 aa, Artificial Sequence
  Synthetic Construct
GGDQLNCHFGSILHTTGLQYRDFIHVSFHDKVYELPFLVALDHRKESVVVAVRGTMSLQDVLTDLSAESEVLDVECEVQDRLAHKGISQAARYVYQRLINDGILSQAFSIAPEYRLVIVGHSLGGGAAALLATMLRAAYPQVRCYAFSPPRGLWSKALQEYSQSFIVSLVLGKDVIPRLSVTNLEDLKRRILRVVAHCNKPKYKILLHGLWYELFGGNPNNLPTELDGGDQEVLTQPLLGEQSLLTRWSPAYSFSSDSPLDSSPKYPPLYPPGRIIHLQEEGASGRFGCCSAAHYSAKWSHEAEFSKILIGPKMLTDHMPDILMRALDSVVSDRAACVSCPAQGVSSVDVA

SEQ ID NO: 913 - protein, 353 aa, Artificial Sequence; identical to SEQ ID NO: 835
  Synthetic Construct

SEQ ID NO: 914 - protein, 364 aa, Artificial Sequence
  Synthetic Construct
KSDAAMTVAVKMLKPSAHLTEREALMSELKVLSYLGNHMNIVNLLGACTIGGPTLVITEYCCYGDLLNFLRRKRDSFICSKQEDHAEAALYKNLLHSKESSCSDSTNEYMDMKPGVSYVVPTKADKRRSVRIGSYIERDVTPAIMEDDELALDLEDLLSFSYQVAKGMAFLASKNCIHRDLAARNILLTHGRITKICDFGLARDIKNDSNYVVKGNARLPVKWMAPESIFNCVYTFESDVWSYGIFLWELFSLGSSPYPGMPVDSKFYKMIKEGFRMLSPEHAPAEMYDIMKTCWDADPLKRPTFKQIVQLIEKQISESTNHIYSNLANCSPNRQKPVVDHSVRINSVGSTASSSQPLLVHDDV

SEQ ID NO: 915 - protein, 435 aa, Artificial Sequence
  Synthetic Construct
HVPKSYRRRRRHKRKTGHKEKKEKERISENYSDKSDIENADESSSSILKPLISPAAERIRFILGEEDDSPAPPQLFTELDELLAVDGQEMEWKETARWIKFEEKVEQGGERWSKPHVATLSLHSLFELRTCMEKGSIMLDREASSLPQLVEMIVDHQIETGLLKPELKDKVTYTLLRKHRHQTKKSNLRSLADIGKTVSSASRMFTNPDNGSPAMTHRNLTSSSLNDISDKPEKDQLKNKFMKKLPRDAEASNVLVGEVDFLDTPFIAFVRLQQAVMLGALTEVPVPTRFLFILLGPKGKAKSYHEIGRAIATLMSDEVFHDIAYKAKDRHDLIAGIDEFLDEVIVLPPGEWDPAIRIEPPKSLPSSDKRKNMYSGGENVQMNGDTPHDGGHGGGGHGDCEELQRTGRFCGGLIKDIKRKAPFFASDFYDALNIQ

SEQ ID NO: 916 - protein, 517 aa, Artificial Sequence
  Synthetic Construct
WIPDGENVKIPVAIKVLRENTSPKANKEILDEAYVMAGVGSPYVSRLLGICLTSTVQLVTQLMPYGCLLDHVRENRGRLGSQDLLNWCMQIAKGMSYLEDVRLVHRDLAARNVLVKSPNHVKITDFGLARLLDIDETEYHADGGKVPIKWMALESILRRRFTHQSDVWSYGVTVWELMTFGAKPYDGIPAREIPDLLEKGERLPQPPICTIDVYMIMVKCWMIDSECRPRFRELVSEFSRMARDPQRFVVIQNEDLGPASPLDSTFYRSLLEDDDMGDLVDAEEYLVPQQGFFCPDPAPGAGGMVHHRHRSSSTRSGGGDLTLGLEPSEEEAPRSPLAPSEGAGSDVFDGDLGMGAAKGLQSLPTHDPSPLQRYSEDPTVPLPSETDGYVAPLTCSPQPEYVNQPDVRPQPPSPREGPLPAARPAGATLERPKTLSPGKNGVVKDVFAFGGAVENPEYLTPQGGAAPQPHPPPAFSPAFDNLYYWDQDPPERGAPPSTFKGTPTAENPEYLGLDVPV

SEQ ID NO: 917 - protein, 541 aa, Artificial Sequence
  Synthetic Construct
IMDPDEVPLDEQCERLPYDASKWEFARERLKLGKSLGRGAFGKVVQASAFGIKKSPTCRTVAVKMLKEGATASEYKALMTELKILTHIGHHLNVVNLLGACTKQGGPLMVIVEYCKYGNLSNYLKSKRDLFFLNKDAALHMEPKKEKMEPGLEQGKKPRLDSVTSSESFASSGFQEDKSLSDVEEEEDSDGFYKEPITMEDLISYSFQVARGMEFLSSRKCIHRDLAARNILLSENNVVKICDFGLARDIYKNPDYVRKGDTRLPLKWMAPESIFDKIYSTKSDVWSYGVLLWEIFSLGGSPYPGVQMDEDFCSRLREGMRMRAPEYSTPEIYQIMLDCWHRDPKERPRFAELVEKLGDLLQANVQQDGKDYIPINAILTGNSGFTYSTPAFSEDFFKESISAPKFNSGSSDDVRYVNAFKFMSLERIKTFEELLPNATSMFDDYQGDSSTLLASPMLKRFTWTDSKPKASLKIDLRVTSKSKESGLSDVSRPSFCHSSCGHVSEGKRRFTYDHAELERKIACCSPPPDYNSVVLYSTPPI

SEQ ID NO: 918 - protein, 548 aa, Artificial Sequence
  Synthetic Construct
IMDPGEVPLEEQCEYLSYDASQWEFPRERLHLGRVLGYGAFGKVVEASAFGIHKGSSCDTVAVKMLKEGATASEHRALMSELKILIHIGNHLNVVNLLGACTKPQGPLMVIVEFCKYGNLSNFLRAKRDAFSPCAEKSPEQRGRFRAMVELARLDRRRPGSSDRVLFARFSKTEGGARRASPDQEAEDLWLSPLTMEDLVCYSFQVARGMEFLASRKCIHRDLAARNILLSESDVVKICDFGLARDIYKDPDYVRKGSARLPLKWMAPESIFDKVYTTQSDVWSFGVLLWEIFSLGASPYPGVQINEEFCQRLRDGTRMRAPELATPAIRRIMLNCWSGDPKARPAFSELVEILGDLLQGRGLQEEEEVCMAPRSSQSSEEGSFSQVSTMALHIAQADAEDSPPSLQRHSLAARYYNWVSFPGCLARGAETRGSSRMKTFEEFPMTPTTYKGSVDNQTDSGMVLASEEFEQIESRHRQESGFSCKGPGQNVAVTRAHPDSQGRRRRPERGARGGQVFYNSEYGELSEPSEEDHCSPSARVTFFTDNSY

SEQ ID NO: 919 - protein, 552 aa, Artificial Sequence
  Synthetic Construct
VMDPDELPLDEHCERLPYDASKWEFPRDRLKLGKPLGRGAFGQVIEADAFGIDKTATCRTVAVKMLKEGATHSEHRALMSELKILIHIGHHLNVVNLLGACTKPGGPLMVIVEFCKFGNLSTYLRSKRNEFVPYKTKGARFRQGKDYVGAIPVDLKRRLDSITSSQSSASSGFVEEKSLSDVEEEEAPEDLYKDFLTLEHLICYSFQVAKGMEFLASRKCIHRDLAARNILLSEKNVVKICDFGLARDIYKDPDYVRKGDARLPLKWMAPETIFDRVYTIQSDVWSFGVLLWEIFSLGASPYPGVKIDEEFCRRLKEGTRMRAPDYTTPEMYQTMLDCWHGEPSQRPTFSELVEHLGNLLQANAQQDGKDYIVLPISETLSMEEDSGLSLPTSPVSCMEEEEVCDPKFHYDNTAGISQYLQNSKRKSRPVSVKTFEDIPLEEPEVKVIPDDNQTDSGMVLASEELKTLEDRTKLSPSFGGMVPSKSRESVASEGSNQTSGYQSGYHSDDTDTTVYSSEEAELLKLIEIGVQTGSTAQILQPDSGTTLSSPPV

SEQ ID NO: 920 - protein, 410 aa, Artificial Sequence
  Synthetic Construct
FEPTVERGELVVRYRVRKSYSRRTTEATLNSLGISEELKEKLRDVMVDRHKVALGKTLGEGEFGAVMEGQLNQDDSILKVAVKTMKIAICTRSELEDFLSEAVCMKEFDHPNVMRLIGVCFQGSERESFPAPVVILPFMKHGDLHSFLLYSRLGDQPVYLPTQMLVKFMADIASGMEYLSTKRFIHRDLAARNCMLNENMSVCVADFGLSKKIYNGDYYRQGRIAKMPVKWIAIESLADRVYTSKSDVWSFGVTMWEIATRGQTPYPGVENSEIYDYLRQGNRLKQPADCLDGLYALMSRCWELNPQDRPSFTELREDLENTLKALPPAQEPDEILYVNMDEGGGYPEPPGAAGGADPPTQPDPKDSCSCLTAAEVHPAGRYVLCPSTTPSPAQPADRGSPAAPGQEDGA

SEQ ID NO: 921 - protein, 572 aa, Artificial Sequence
  Synthetic Construct
WVPEGETVKIPVAIKILNETTGPKANVEFMDEALIMASMDHPHLVRLLGVCLSPTIQLVTQLMPHGCLLEYVHEHKDNIGSQLLLNWCVQIAKGMMYLEERRLVHRDLAARNVLVKSPNHVKITDFGLARLLEGDEKEYNADGGKMPIKWMALECIHYRKFTHQSDVWSYGVTIWELMTFGGKPYDGIPTREIPDLLEKGERLPQPPICTIDVYMVMVKCWMIDADSRPKFKELAAEFSRMARDPQRYLVIQGDDRMKLPSPNDSKFFQNLLDEEDLEDMMDAEEYLVPQAFNIPPPIYTSRARIDSNRSEIGHSPPPAYTPMSGNQFVYRDGGFAAEQGVSVPYRAPTSTIPEAPVAQGATAEIFDDSCCNGTLRKPVAPHVQEDSSTQRYSADPTVFAPERSPRGELDEEGYMTPMRDKPKQEYLNPVEENPFVSRRKNGDLQALDNPEYHNASNGPPKAEDEYVNEPLYLNTFANTLGKAEYLKNNILSMPEKAKKAFDNPDYWNHSLPPRSTLQHPDYLQEYSTKYFYKQNGRIRPIVAENPEYLSEFSLKPGTVLPPPPYRHRNTVV

SEQ ID NO: 922 - protein, 610 aa, Artificial Sequence; identical to SEQ ID NO: 836
  Synthetic Construct

SEQ ID NO: 923 - protein, 651 aa, Artificial Sequence
  Synthetic Construct
EPQDGCHPGDSVERSVTCLPSASDENENQLDGDGHEHLTSSDSAMGKPQVSEQDSLNNNESCTLSCEVAAGENLQNTLCEASRDEQAFLGKDKKIPGKRSPRSKKGTAKKIPPGLFSGDIAPLMQEKVLSAVTYAVDDEEAAEVNANEQPEAPKLVLQSLFSLIRGEVEQLDSRALPLCLHQIAESYFQEEDYEKAMKFIQLERLYHEQLLANLSAIQEQWETKWKTVQPHTVTALRNSEKGFNGEDFERLTKICATHQDPLLSKHKIAAVEKSQERKCSTQLLVSEDPKEGGATTKESESKTCLGTESSKESQHTVEPLGSSPCCHQMDVQTDSPSLSVTAGKDHMEELLCSAEATLALHTQSSETAGSPSGPDSSEDACEDDSRLQLAQTEACQDVARIEGIAEDPKVFLSSKSKTEPLISPGCDRIPPALISEGKYSQAQRKELRLPLRDASEALPTDQLENNELNELQQPDLTDSDGKSPQAQADSDGSENVLCGNNQISDLGILLPEVCMAPEEKGDKDDQLNKETEDYLNSLLEGCLKDTEDSLSYEDNQDDDSDLLQDLSPEEASYSLQENLPSDESCLSLDDLAKRIEIAEVVPTEGLVSILKKRNDTVGDHPAQMQHKPSKRRVRFQEIDDSLDQDEVGGGS

SEQ ID NO: 924 - protein, 766 aa, Artificial Sequence
  Synthetic Construct
SKNIPTTKDVEPLLEIDGDIRNFEVFLSSRTPVLVARDVKVFLPCTVNLDPKLREIIADVRAAREQISIGGLAYPPLPLHEGPPRAPSGYSQPPSVCSSTSFNGPFAGGVVSPQPHSSYYSGMTGPQHPFYNRPFFAPYLYTPRYYPGGSQHLISRPSVKTSLPRDQNNGLEVIKEDAAEGLSSPTDSSRGSGPAPGPVVLLNSLNVDAVCEKLKQIEGLDQSMLPQYCTTIKKANINGRVLAQCNIDELKKEMNMNFGDWHLFRSTVLEMRNAESHVVPEDPRFLSESSSGPAPHGEPARRASHNELPHTELSSQTPYTLNFSFEELNTLGLDEGAPRHSNLSWQSQTRRTPSLSSLNSQDSSIEISKLTDKVQAEYRDAYREYIAQMSQLEGGPGSTTISGRSSPHSTYYMGQSSSGGSIHSNLEQEKGKDSEPKPDDGRKSFLMKRGDVIDYSSSGVSTNDASPLDPITEEDEKSDQSGSKLLPGKKSSERSSLFQTDLKLKGSGLRYQKLPSDEDESGTEESDNTPLLKDDKDRKAEGKVERVPKSPEHSAEPIRTFIKAKEYLSDALLDKKDSSDSGVRSSESSPNHSLHNEVADDSQLEKANLIELEDDSHSGKRGIPHSLSGLQDPIIARMSICSEDKKSPSECSLIASSPEENWPACQKAYNLNRTPSTVTLNNNSAPANRANQNFDEMEGIRETSQVILRPSSSPNPTTIQNENLKSMTHKRSQRSSYTRLSKDPPELHAAASSESTGFGEERESIL

SEQ ID NO: 925 - protein, 1171 aa, Artificial Sequence
  Synthetic Construct
WSLGVTLWELFDNAAQPYSNLSNLDVLNQVIRERDTKLPKPQLEQPYSDRWYEVLQFCWLSPEKRPAAEDVHRLLTYLRLQSQRDSEVDFEQQWNALKPNTNSRDSSNNAAFPILDHFARDRLGREMEEVLTVTETSQGLSFEYVWEAAKHDHFDERSRGHLDEGLSYTSIFYPVEVFESSLSDPGPGKQDDSGQDVPLRVPGVVPVFDAHNLSVGSDYYIQLEEKSGSNLELDYPPALLTTDMDNPERTGPELSQLTALRSVELEESSTDEDFFQSSTDPKDSSLPGDLHVTSGPESPFNNIFNDVDKSEDLPSHQKIFDLMELNGVQADFKPATLSSSLDNPKESVITGHFEKEKPRKIFDSEPLCLSDNLMHQDNFDPLNVQELSENFLFLQEKNLLKGSLSSKEHINDLQTELKNAGFTEAMLETSCRNSLDTELQFAENKPGLSLLQENVSTKGDDTDVMLTGDTLSTSLQSSPEVQVPPTSFETEETPRRVPPDSLPTQGETQPTCLDVIVPEDCLHQDISPDAVTVPVEILSTDARTHSLDNRSQDSPGESEETLRLTESDSVLADDILASRVSVGSSLPELGQELHNKPFSEDHHSHRRLEKNLEAVETLNQLNSKDAAKEAGLVSALSSDSTSQDSLLEDSLSAPFPASEPSLETPDSLESVDVHEALLDSLGSHTPQKLVPPDKPADSGYETENLESPEWTLHPAPEGTADSEPATTGDGGHSGLPPNPVIVISDAGDGHRGTEVTPETFTAGSQGSYRDSAYFSDNDSEPEKRSEEVPGTSPSALVLVQEQPLPEPVLPEQSPAAQDSCLEARKSQPDESCLSALHNSSDLELRATPEPAQTGVPQQVHPTEDEASSPWSVLNAELSSGDDFETQDDRPCTLASTGTNTNELLAYTNSALDKSLSSHSEGPKLKEPDIEGKYLGKLGVSGMLDLSEDGMDADEEDENSDDSDEDLRAFNLHSLSSESEDETEHPVPIILSNEDGRHLRSLLKPTAANAPDPLPEDWKKEKKAVTFFDDVTVYLFDQETPTKELGPCGGEACGPDLSGPAPASGSPYLSRCINSESSTDEEGGGFEWDDDFSPDPFMSKTTSNLLSSKPSLQTSKYFSPPPPARSTEQSWPHSAPYSRFSISPANIASFSLTHLTDSDIEQGGSSEDGEKD

SEQ ID NO: 926 - protein, 6 aa, Artificial Sequence
  Synthetic Construct
TAYELV

SEQ ID NO: 927 - protein, 6 aa, Artificial Sequence
  Synthetic Construct
TAYGLI

SEQ ID NO: 928 - protein, 6 aa, Artificial Sequence
  Synthetic Construct
TAYNAV

SEQ ID NO: 929 - protein, 6 aa, Artificial Sequence
  Synthetic Construct
TCYGLV

SEQ ID NO: 930 - protein, 6 aa, Artificial Sequence
  Synthetic Construct
TCYPDI

SEQ ID NO: 931 - protein, 6 aa, Artificial Sequence
  Synthetic Construct
TDYASI

SEQ ID NO: 932 - protein, 6 aa, Artificial Sequence
  Synthetic Construct
TDYDLV

SEQ ID NO: 933 - protein, 6 aa, Artificial Sequence
  Synthetic Construct
TDYLSI

SEQ ID NO: 934 - protein, 6 aa, Artificial Sequence
  Synthetic Construct
TDYQQV

SEQ ID NO: 935 - protein, 6 aa, Artificial Sequence
  Synthetic Construct
TDYYRV

SEQ ID NO: 936 - protein, 6 aa, Artificial Sequence
  Synthetic Construct
TEYASI

SEQ ID NO: 937 - protein, 6 aa, Artificial Sequence
  Synthetic Construct
TEYATI

SEQ ID NO: 938 - protein, 6 aa, Artificial Sequence
  Synthetic Construct
TEYDTI

SEQ ID NO: 939 - protein, 6 aa, Artificial Sequence
  Synthetic Construct
TEYPLV

SEQ ID NO: 940 - protein, 6 aa, Artificial Sequence
  Synthetic Construct
TEYSEI

SEQ ID NO: 941 - protein, 6 aa, Artificial Sequence
  Synthetic Construct
TEYSEV

SEQ ID NO: 942 - protein, 6 aa, Artificial Sequence
  Synthetic Construct
TEYSTI

SEQ ID NO: 943 - protein, 6 aa, Artificial Sequence
  Synthetic Construct
TEYTKV

SEQ ID NO: 944 - protein, 6 aa, Artificial Sequence
  Synthetic Construct
TFYHVV

SEQ ID NO: 945 - protein, 6 aa, Artificial Sequence
  Synthetic Construct
TFYLLI

SEQ ID NO: 946 - protein, 6 aa, Artificial Sequence
  Synthetic Construct
TFYNKI

SEQ ID NO: 947 - protein, 6 aa, Artificial Sequence
  Synthetic Construct
TFYPDI

SEQ ID NO: 948 - protein, 6 aa, Artificial Sequence
  Synthetic Construct
TGYEDV

SEQ ID NO: 949 - protein, 6 aa, Artificial Sequence
  Synthetic Construct
TGYLSI

SEQ ID NO: 950 - protein, 6 aa, Artificial Sequence
  Synthetic Construct
THYKEI

SEQ ID NO: 951 - protein, 6 aa, Artificial Sequence
  Synthetic Construct
TIYAQV

SEQ ID NO: 952 - protein, 6 aa, Artificial Sequence
  Synthetic Construct
TIYAVV

SEQ ID NO: 953 - protein, 6 aa, Artificial Sequence
  Synthetic Construct
TIYCSI

SEQ ID NO: 954 - protein, 6 aa, Artificial Sequence
  Synthetic Construct
TIYEDV

SEQ ID NO: 955 - protein, 6 aa, Artificial Sequence
  Synthetic Construct
TIYERI

SEQ ID NO: 956 - protein, 6 aa, Artificial Sequence
  Synthetic Construct
TIYEVI

SEQ ID NO: 957 - protein, 6 aa, Artificial Sequence
  Synthetic Construct
TIYHVI

SEQ ID NO: 958 - protein, 6 aa, Artificial Sequence
  Synthetic Construct
TIYIGV

SEQ ID NO: 959 - protein, 6 aa, Artificial Sequence
  Synthetic Construct
TIYLKV

SEQ ID NO: 960 - protein, 6 aa, Artificial Sequence
  Synthetic Construct
TIYSMI

SEQ ID NO: 961 - protein, 6 aa, Artificial Sequence
  Synthetic Construct
TIYSTI

SEQ ID NO: 962 - protein, 6 aa, Artificial Sequence
  Synthetic Construct
TIYTYI

SEQ ID NO: 963 - protein, 6 aa, Artificial Sequence
  Synthetic Construct
TKYFHI

SEQ ID NO: 964 - protein, 6 aa, Artificial Sequence
  Synthetic Construct
TKYMEI

SEQ ID NO: 965 - protein, 6 aa, Artificial Sequence
  Synthetic Construct
TKYQSV

SEQ ID NO: 966 - protein, 6 aa, Artificial Sequence
  Synthetic Construct
TKYSNI

SEQ ID NO: 967 - protein, 6 aa, Artificial Sequence
  Synthetic Construct
TKYSTV

SEQ ID NO: 968 - protein, 6 aa, Artificial Sequence
  Synthetic Construct
TLYASV

SEQ ID NO: 969 - protein, 6 aa, Artificial Sequence
  Synthetic Construct
TLYAVV

SEQ ID NO: 970 - protein, 6 aa, Artificial Sequence
  Synthetic Construct
TLYFWV

SEQ ID NO: 971 - protein, 6 aa, Artificial Sequence
  Synthetic Construct
TLYHLV

SEQ ID NO: 972 - protein, 6 aa, Artificial Sequence
  Synthetic Construct
TLYPMV

SEQ ID NO: 973 - protein, 6 aa, Artificial Sequence
  Synthetic Construct
TLYPPI

SEQ ID NO: 974 - protein, 6 aa, Artificial Sequence
  Synthetic Construct
TLYRDI

SEQ ID NO: 975 - protein, 6 aa, Artificial Sequence
  Synthetic Construct
TLYRDV

SEQ ID NO: 976 - protein, 6 aa, Artificial Sequence
  Synthetic Construct
TLYSKI

SEQ ID NO: 977 - protein, 6 aa, Artificial Sequence
  Synthetic Construct
TLYSLI

SEQ ID NO: 978 - protein, 6 aa, Artificial Sequence
  Synthetic Construct
TLYSPV

SEQ ID NO: 979 - protein, 6 aa, Artificial Sequence
  Synthetic Construct
TMYAQV

SEQ ID NO: 980 - protein, 6 aa, Artificial Sequence
  Synthetic Construct
TMYCQV

SEQ ID NO: 981 - protein, 6 aa, Artificial Sequence
  Synthetic Construct
TNYKAV

SEQ ID NO: 982 - protein, 6 aa, Artificial Sequence
  Synthetic Construct
TNYNLV

SEQ ID NO: 983 - protein, 6 aa, Artificial Sequence
  Synthetic Construct
TPYAGI

SEQ ID NO: 984 - protein, 6 aa, Artificial Sequence
  Synthetic Construct
TPYPGV

SEQ ID NO: 985 - protein, 6 aa, Artificial Sequence
  Synthetic Construct
TPYVDI

SEQ ID NO: 986 - protein, 6 aa, Artificial Sequence
  Synthetic Construct
TQYGRV

SEQ ID NO: 987 - protein, 6 aa, Artificial Sequence
  Synthetic Construct
TQYNQV

SEQ ID NO: 988 - protein, 6 aa, Artificial Sequence
  Synthetic Construct
TRYAYV

SEQ ID NO: 989 - protein, 6 aa, Artificial Sequence
  Synthetic Construct
TRYGEV

SEQ ID NO: 990 - protein, 6 aa, Artificial Sequence
  Synthetic Construct
TRYHSV

SEQ ID NO: 991 - protein, 6 aa, Artificial Sequence
  Synthetic Construct
TRYKTI

SEQ ID NO: 992 - protein, 6 aa, Artificial Sequence
  Synthetic Construct
TRYLAI

SEQ ID NO: 993 - protein, 6 aa, Artificial Sequence
  Synthetic Construct
TRYMAI

SEQ ID NO: 994 - protein, 6 aa, Artificial Sequence
  Synthetic Construct
TRYQKI

SEQ ID NO: 995 - protein, 6 aa, Artificial Sequence
  Synthetic Construct
TRYQQI

SEQ ID NO: 996 - protein, 6 aa, Artificial Sequence
  Synthetic Construct
TRYSNI

SEQ ID NO: 997 - protein, 6 aa, Artificial Sequence
  Synthetic Construct
TRYSPI

SEQ ID NO: 998 - protein, 6 aa, Artificial Sequence
  Synthetic Construct
TSYGTV

SEQ ID NO: 999 - protein, 6 aa, Artificial Sequence
  Synthetic Construct
TSYMEV

SEQ ID NO: 1000 - protein, 6 aa, Artificial Sequence
  Synthetic Construct
TSYQGV

SEQ ID NO: 1001 - protein, 6 aa, Artificial Sequence
  Synthetic Construct
TSYTTI

SEQ ID NO: 1002 - protein, 6 aa, Artificial Sequence
  Synthetic Construct
TTYRSI

SEQ ID NO: 1003 - protein, 6 aa, Artificial Sequence
  Synthetic Construct
TTYSDV

SEQ ID NO: 1004 - protein, 6 aa, Artificial Sequence
  Synthetic Construct
TTYVTI

SEQ ID NO: 1005 - protein, 6 aa, Artificial Sequence
  Synthetic Construct
TVYAQI

SEQ ID NO: 1006 - protein, 6 aa, Artificial Sequence
  Synthetic Construct
TVYASV

SEQ ID NO: 1007 - protein, 6 aa, Artificial Sequence
  Synthetic Construct
TVYEVI

SEQ ID NO: 1008 - protein, 6 aa, Artificial Sequence
  Synthetic Construct
TVYGDV

SEQ ID NO: 1009 - protein, 6 aa, Artificial Sequence
  Synthetic Construct
TVYKGI

SEQ ID NO: 1010 - protein, 6 aa, Artificial Sequence
  Synthetic Construct
TVYQRV

SEQ ID NO: 1011 - protein, 6 aa, Artificial Sequence
  Synthetic Construct
TVYSEV

SEQ ID NO: 1012 - protein, 6 aa, Artificial Sequence
  Synthetic Construct
TVYSTV

SEQ ID NO: 1013 - protein, 6 aa, Artificial Sequence
  Synthetic Construct
TYYHSI

SEQ ID NO: 1014 - protein, 6 aa, Artificial Sequence
  Synthetic Construct
TYYLQI

SEQ ID NO: 1015 - protein, 6 aa, Artificial Sequence
  Synthetic Construct
TYYYSV

SEQ ID NO: 1016 - protein, 6 aa, Artificial Sequence
  Synthetic Construct
LLYEMV

SEQ ID NO: 1017 - protein, 6 aa, Artificial Sequence
  Synthetic Construct
ITYFAL

SEQ ID NO: 1018 - protein, 6 aa, Artificial Sequence
  Synthetic Construct
ISYKGL

SEQ ID NO: 1019 - protein, 6 aa, Artificial Sequence
  Synthetic Construct
LAYHTV

SEQ ID NO: 1020 - protein, 6 aa, Artificial Sequence
  Synthetic Construct
VQYLRL

SEQ ID NO: 1021 - protein, 6 aa, Artificial Sequence
  Synthetic Construct
LTYVLL

SEQ ID NO: 1022 - protein, 6 aa, Artificial Sequence
  Synthetic Construct
VRYSIV

SEQ ID NO: 1023 - protein, 6 aa, Artificial Sequence
  Synthetic Construct
LLYLLL

SEQ ID NO: 1024 - protein, 6 aa, Artificial Sequence
  Synthetic Construct
IAYGDI

SEQ ID NO: 1025 - protein, 6 aa, Artificial Sequence
  Synthetic Construct
IAYRDL

SEQ ID NO: 1026 - protein, 6 aa, Artificial Sequence
  Synthetic Construct
IAYSLL

SEQ ID NO: 1027 - protein, 6 aa, Artificial Sequence
  Synthetic Construct
IAYSRL

SEQ ID NO: 1028 - protein, 6 aa, Artificial Sequence
  Synthetic Construct
ICYALL

SEQ ID NO: 1029 - protein, 6 aa, Artificial Sequence
  Synthetic Construct
ICYDAL

SEQ ID NO: 1030 - protein, 6 aa, ARTIFICIAL SEQUENCE
  Synthetic Construct
ICYPLL

SEQ ID NO: 1031 - protein, 6 aa, ARTIFICIAL SEQUENCE
  Synthetic Construct
ICYQLI

SEQ ID NO: 1032 - protein, 6 aa, ARTIFICIAL SEQUENCE
  Synthetic Construct
IDYILV

SEQ ID NO: 1033 - protein, 6 aa, ARTIFICIAL SEQUENCE
  Synthetic Construct
IDYKTL

SEQ ID NO: 1034 - protein, 6 aa, ARTIFICIAL SEQUENCE
  Synthetic Construct
IDYTQL

SEQ ID NO: 1035 - protein, 6 aa, ARTIFICIAL SEQUENCE
  Synthetic Construct
IDYYNL

SEQ ID NO: 1036 - protein, 6 aa, ARTIFICIAL SEQUENCE
  Synthetic Construct
IEYCKL

SEQ ID NO: 1037 - protein, 6 aa, ARTIFICIAL SEQUENCE
  Synthetic Construct
IEYDQI

SEQ ID NO: 1038 - protein, 6 aa, ARTIFICIAL SEQUENCE
  Synthetic Construct
IEYGPL

SEQ ID NO: 1039 - protein, 6 aa, ARTIFICIAL SEQUENCE
  Synthetic Construct
IEYIRV

SEQ ID NO: 1040 - protein, 6 aa, ARTIFICIAL SEQUENCE
  Synthetic Construct
IEYKSL

SEQ ID NO: 1041 - protein, 6 aa, ARTIFICIAL SEQUENCE
  Synthetic Construct
IEYKTL

SEQ ID NO: 1042 - protein, 6 aa, ARTIFICIAL SEQUENCE
  Synthetic Construct
IEYSVL

SEQ ID NO: 1043 - protein, 6 aa, ARTIFICIAL SEQUENCE
  Synthetic Construct
IEYWGI

SEQ ID NO: 1044 - protein, 6 aa, ARTIFICIAL SEQUENCE
  Synthetic Construct
IFYGNV

SEQ ID NO: 1045 - protein, 6 aa, ARTIFICIAL SEQUENCE
  Synthetic Construct
IFYHNL

SEQ ID NO: 1046 - protein, 6 aa, ARTIFICIAL SEQUENCE
  Synthetic Construct
IFYKDI

SEQ ID NO: 1047 - protein, 6 aa, ARTIFICIAL SEQUENCE
  Synthetic Construct
IFYQNV

SEQ ID NO: 1048 - protein, 6 aa, ARTIFICIAL SEQUENCE
  Synthetic Construct
IFYRLI

SEQ ID NO: 1049 - protein, 6 aa, ARTIFICIAL SEQUENCE
  Synthetic Construct
IGYDIL

SEQ ID NO: 1050 - protein, 6 aa, ARTIFICIAL SEQUENCE
  Synthetic Construct
IGYDVL

SEQ ID NO: 1051 - protein, 6 aa, ARTIFICIAL SEQUENCE
  Synthetic Construct
IGYICL

SEQ ID NO: 1052 - protein, 6 aa, ARTIFICIAL SEQUENCE
  Synthetic Construct
IGYKAI

SEQ ID NO: 1053 - protein, 6 aa, ARTIFICIAL SEQUENCE
  Synthetic Construct
IGYLEL

SEQ ID NO: 1054 - protein, 6 aa, ARTIFICIAL SEQUENCE
  Synthetic Construct
IGYLPL

SEQ ID NO: 1055 - protein, 6 aa, ARTIFICIAL SEQUENCE
  Synthetic Construct
IGYLRL

SEQ ID NO: 1056 - protein, 6 aa, ARTIFICIAL SEQUENCE
  Synthetic Construct
IGYPFL

SEQ ID NO: 1057 - protein, 6 aa, ARTIFICIAL SEQUENCE
  Synthetic Construct
IGYSDL

SEQ ID NO: 1058 - protein, 6 aa, ARTIFICIAL SEQUENCE
  Synthetic Construct
IHYRQI

SEQ ID NO: 1059 - protein, 6 aa, ARTIFICIAL SEQUENCE
  Synthetic Construct
IHYSEL

SEQ ID NO: 1060 - protein, 6 aa, ARTIFICIAL SEQUENCE
  Synthetic Construct
IIYAFL

SEQ ID NO: 1061 - protein, 6 aa, ARTIFICIAL SEQUENCE
  Synthetic Construct
IIYHVI

SEQ ID NO: 1062 - protein, 6 aa, ARTIFICIAL SEQUENCE
  Synthetic Construct
IIYMFL

SEQ ID NO: 1063 - protein, 6 aa, ARTIFICIAL SEQUENCE
  Synthetic Construct
IIYNLL

SEQ ID NO: 1064 - protein, 6 aa, ARTIFICIAL SEQUENCE
  Synthetic Construct
IIYNNL

SEQ ID NO: 1065 - protein, 6 aa, ARTIFICIAL SEQUENCE
  Synthetic Construct
IIYSEV

SEQ ID NO: 1066 - protein, 6 aa, ARTIFICIAL SEQUENCE
  Synthetic Construct
IKYCLV

SEQ ID NO: 1067 - protein, 6 aa, Artificial Sequence
  Synthetic Construct
IKYKEL

SEQ ID NO: 1068 - protein, 6 aa, Artificial Sequence
  Synthetic Construct
IKYLAL

SEQ ID NO: 1069 - protein, 6 aa, Artificial Sequence
  Synthetic Construct
IKYTCI

SEQ ID NO: 1070 - protein, 6 aa, Artificial Sequence
  Synthetic Construct
ILYADI

SEQ ID NO: 1071 - protein, 6 aa, Artificial Sequence
  Synthetic Construct
ILYAFL

SEQ ID NO: 1072 - protein, 6 aa, Artificial Sequence
  Synthetic Construct
ILYCSV

SEQ ID NO: 1073 - protein, 6 aa, Artificial Sequence
  Synthetic Construct
ILYEGL

SEQ ID NO: 1074 - protein, 6 aa, Artificial Sequence
  Synthetic Construct
ILYELL

SEQ ID NO: 1075 - protein, 6 aa, Artificial Sequence
  Synthetic Construct
ILYFQI

SEQ ID NO: 1076 - protein, 6 aa, Artificial Sequence
  Synthetic Construct
ILYHTV

SEQ ID NO: 1077 - protein, 6 aa, Artificial Sequence
  Synthetic Construct
ILYLQV

SEQ ID NO: 1078 - protein, 6 aa, Artificial Sequence
  Synthetic Construct
ILYSIL

SEQ ID NO: 1079 - protein, 6 aa, Artificial Sequence
  Synthetic Construct
ILYSVL

SEQ ID NO: 1080 - protein, 6 aa, Artificial Sequence
  Synthetic Construct
ILYTEL

SEQ ID NO: 1081 - protein, 6 aa, Artificial Sequence
  Synthetic Construct
ILYTIL

SEQ ID NO: 1082 - protein, 6 aa, Artificial Sequence
  Synthetic Construct
IMYTLV

SEQ ID NO: 1083 - protein, 6 aa, Artificial Sequence
  Synthetic Construct
INYCSV

SEQ ID NO: 1084 - protein, 6 aa, Artificial Sequence
  Synthetic Construct
INYKDI

SEQ ID NO: 1085 - protein, 6 aa, Artificial Sequence
  Synthetic Construct
INYTTV

SEQ ID NO: 1086 - protein, 6 aa, Artificial Sequence
  Synthetic Construct
INYVLL

SEQ ID NO: 1087 - protein, 6 aa, Artificial Sequence
  Synthetic Construct
IPYDVL

SEQ ID NO: 1088 - protein, 6 aa, Artificial Sequence
  Synthetic Construct
IPYLLV

SEQ ID NO: 1089 - protein, 6 aa, Artificial Sequence
  Synthetic Construct
IPYRTV

SEQ ID NO: 1090 - protein, 6 aa, Artificial Sequence
  Synthetic Construct
IPYSQL

SEQ ID NO: 1091 - protein, 6 aa, Artificial Sequence
  Synthetic Construct
IPYSRI

SEQ ID NO: 1092 - protein, 6 aa, Artificial Sequence
  Synthetic Construct
IPYTQI

SEQ ID NO: 1093 - protein, 6 aa, Artificial Sequence
  Synthetic Construct
IQYAPL

SEQ ID NO: 1094 - protein, 6 aa, Artificial Sequence
  Synthetic Construct
IQYASL

SEQ ID NO: 1095 - protein, 6 aa, Artificial Sequence
  Synthetic Construct
IQYERL

SEQ ID NO: 1096 - protein, 6 aa, Artificial Sequence
  Synthetic Construct
IQYGII

SEQ ID NO: 1097 - protein, 6 aa, Artificial Sequence
  Synthetic Construct
IQYGNV

SEQ ID NO: 1098 - protein, 6 aa, Artificial Sequence
  Synthetic Construct
IQYGRV

SEQ ID NO: 1099 - protein, 6 aa, Artificial Sequence
  Synthetic Construct
IQYNVV

SEQ ID NO: 1100 - protein, 6 aa, Artificial Sequence
  Synthetic Construct
IQYRSI

SEQ ID NO: 1101 - protein, 6 aa, Artificial Sequence
  Synthetic Construct
IQYTEL

SEQ ID NO: 1102 - protein, 6 aa, Artificial Sequence
  Synthetic Construct
IQYWGI

SEQ ID NO: 1103 - protein, 6 aa, Artificial Sequence
  Synthetic Construct
IRYANL

SEQ ID NO: 1104 - protein, 6 aa, Artificial Sequence
  Synthetic Construct
IRYLDL

SEQ ID NO: 1105 - protein, 6 aa, Artificial Sequence
  Synthetic Construct
IRYPLL

SEQ ID NO: 1106 - protein, 6 aa, Artificial Sequence
  Synthetic Construct
IRYRLL

SEQ ID NO: 1107 - protein, 6 aa, Artificial Sequence
  Synthetic Construct
IRYRTI

SEQ ID NO: 1108 - protein, 6 aa, Artificial Sequence
  Synthetic Construct
ISYASL

SEQ ID NO: 1109 - protein, 6 aa, Artificial Sequence
  Synthetic Construct
ISYCGV

SEQ ID NO: 1110 - protein, 6 aa, Artificial Sequence
  Synthetic Construct
ISYEPI

SEQ ID NO: 1111 - protein, 6 aa, Artificial Sequence
  Synthetic Construct
ISYFQI

SEQ ID NO: 1112 - protein, 6 aa, Artificial Sequence
  Synthetic Construct
ISYGLI

SEQ ID NO: 1113 - protein, 6 aa, Artificial Sequence
  Synthetic Construct
ISYKKL

SEQ ID NO: 1114 - protein, 6 aa, Artificial Sequence
  Synthetic Construct
ISYLPL

SEQ ID NO: 1115 - protein, 6 aa, Artificial Sequence
  Synthetic Construct
ISYPML

SEQ ID NO: 1116 - protein, 6 aa, Artificial Sequence
  Synthetic Construct
ISYTTL

SEQ ID NO: 1117 - protein, 6 aa, Artificial Sequence
  Synthetic Construct
ITYAAV

SEQ ID NO: 1118 - protein, 6 aa, Artificial Sequence
  Synthetic Construct
ITYADL

SEQ ID NO: 1119 - protein, 6 aa, Artificial Sequence
  Synthetic Construct
ITYAEL

SEQ ID NO: 1120 - protein, 6 aa, Artificial Sequence
  Synthetic Construct
ITYAEV

SEQ ID NO: 1121 - protein, 6 aa, Artificial Sequence
  Synthetic Construct
ITYASV

SEQ ID NO: 1122 - protein, 6 aa, Artificial Sequence
  Synthetic Construct
ITYDLI

SEQ ID NO: 1123 - protein, 6 aa, Artificial Sequence
  Synthetic Construct
ITYENV

SEQ ID NO: 1124 - protein, 6 aa, Artificial Sequence
  Synthetic Construct
ITYQLL

SEQ ID NO: 1125 - protein, 6 aa, Artificial Sequence
  Synthetic Construct
ITYSLL

SEQ ID NO: 1126 - protein, 6 aa, Artificial Sequence
  Synthetic Construct
IVYAEL

SEQ ID NO: 1127 - protein, 6 aa, Artificial Sequence
  Synthetic Construct
IVYALV

SEQ ID NO: 1128 - protein, 6 aa, Artificial Sequence
  Synthetic Construct
IVYASL

SEQ ID NO: 1129 - protein, 6 aa, Artificial Sequence
  Synthetic Construct
IVYEIL

SEQ ID NO: 1130 - protein, 6 aa, Artificial Sequence
  Synthetic Construct
IVYFIL

SEQ ID NO: 1131 - protein, 6 aa, Artificial Sequence
  Synthetic Construct
IVYHML

SEQ ID NO: 1132 - protein, 6 aa, Artificial Sequence
  Synthetic Construct
IVYLCI

SEQ ID NO: 1133 - protein, 6 aa, Artificial Sequence
  Synthetic Construct
IVYRLL

SEQ ID NO: 1134 - protein, 6 aa, Artificial Sequence
  Synthetic Construct
IVYSAL

SEQ ID NO: 1135 - protein, 6 aa, Artificial Sequence
  Synthetic Construct
IVYSWV

SEQ ID NO: 1136 - protein, 6 aa, Artificial Sequence
  Synthetic Construct
IVYTEL

SEQ ID NO: 1137 - protein, 6 aa, Artificial Sequence
  Synthetic Construct
IVYYIL

SEQ ID NO: 1138 - protein, 6 aa, Artificial Sequence
  Synthetic Construct
IWYENL

SEQ ID NO: 1139 - protein, 6 aa, Artificial Sequence
  Synthetic Construct
IWYFVV

SEQ ID NO: 1140 - protein, 6 aa, Artificial Sequence
  Synthetic Construct
IWYNIL

SEQ ID NO: 1141 - protein, 6 aa, Artificial Sequence
  Synthetic Construct
IYYLGV

SEQ ID NO: 1142 - protein, 6 aa, Artificial Sequence
  Synthetic Construct
LAYALL

SEQ ID NO: 1143 - protein, 6 aa, Artificial Sequence
  Synthetic Construct
LAYARI

SEQ ID NO: 1144 - protein, 6 aa, Artificial Sequence
  Synthetic Construct
LAYDSV

SEQ ID NO: 1145 - protein, 6 aa, Artificial Sequence
  Synthetic Construct
LAYFGV

SEQ ID NO: 1146 - protein, 6 aa, Artificial Sequence
  Synthetic Construct
LAYHRL

SEQ ID NO: 1147 - protein, 6 aa, Artificial Sequence
  Synthetic Construct
LAYKDL

SEQ ID NO: 1148 - protein, 6 aa, Artificial Sequence
  Synthetic Construct
LAYKRI

SEQ ID NO: 1149 - protein, 6 aa, Artificial Sequence
  Synthetic Construct
LAYPPL

SEQ ID NO: 1150 - protein, 6 aa, Artificial Sequence
  Synthetic Construct
LAYQTL

SEQ ID NO: 1151 - protein, 6 aa, Artificial Sequence
  Synthetic Construct
LAYREV

SEQ ID NO: 1152 - protein, 6 aa, Artificial Sequence
  Synthetic Construct
LAYRII

SEQ ID NO: 1153 - protein, 6 aa, Artificial Sequence
  Synthetic Construct
LAYRLL

SEQ ID NO: 1154 - protein, 6 aa, Artificial Sequence
  Synthetic Construct
LAYSQL

SEQ ID NO: 1155 - protein, 6 aa, Artificial Sequence
  Synthetic Construct
LAYSSV

SEQ ID NO: 1156 - protein, 6 aa, Artificial Sequence
  Synthetic Construct
LAYTLL

SEQ ID NO: 1157 - protein, 6 aa, Artificial Sequence
  Synthetic Construct
LAYWGI

SEQ ID NO: 1158 - protein, 6 aa, Artificial Sequence
  Synthetic Construct
LAYYTV

SEQ ID NO: 1159 - protein, 6 aa, Artificial Sequence
  Synthetic Construct
LCYADL

SEQ ID NO: 1160 - protein, 6 aa, Artificial Sequence
  Synthetic Construct
LCYAIL

SEQ ID NO: 1161 - protein, 6 aa, Artificial Sequence
  Synthetic Construct
LCYFHL

SEQ ID NO: 1162 - protein, 6 aa, Artificial Sequence
  Synthetic Construct
LCYHPI

SEQ ID NO: 1163 - protein, 6 aa, Artificial Sequence
  Synthetic Construct
LCYKEI

SEQ ID NO: 1164 - protein, 6 aa, Artificial Sequence
  Synthetic Construct
LCYKFL

SEQ ID NO: 1165 - protein, 6 aa, Artificial Sequence
  Synthetic Construct
LCYMII

SEQ ID NO: 1166 - protein, 6 aa, Artificial Sequence
  Synthetic Construct
LCYRKI

SEQ ID NO: 1167 - protein, 6 aa, Artificial Sequence
  Synthetic Construct
LCYRVL

SEQ ID NO: 1168 - protein, 6 aa, Artificial Sequence
  Synthetic Construct
LCYSTV

SEQ ID NO: 1169 - protein, 6 aa, Artificial Sequence
  Synthetic Construct
LCYTLV

SEQ ID NO: 1170 - protein, 6 aa, Artificial Sequence
  Synthetic Construct
LDYASI

SEQ ID NO: 1171 - protein, 6 aa, Artificial Sequence
  Synthetic Construct
LDYCEL

SEQ ID NO: 1172 - protein, 6 aa, Artificial Sequence
  Synthetic Construct
LDYDKI

SEQ ID NO: 1173 - protein, 6 aa, Artificial Sequence
  Synthetic Construct
LDYDKL

SEQ ID NO: 1174 - protein, 6 aa, Artificial Sequence
  Synthetic Construct
LDYDYL

SEQ ID NO: 1175 - protein, 6 aa, Artificial Sequence
  Synthetic Construct
LDYDYV

SEQ ID NO: 1176 - protein, 6 aa, Artificial Sequence
  Synthetic Construct
LDYEFL

SEQ ID NO: 1177 - protein, 6 aa, Artificial Sequence
  Synthetic Construct
LDYINV

SEQ ID NO: 1178 - protein, 6 aa, Artificial Sequence
  Synthetic Construct
LDYNNL

SEQ ID NO: 1179 - protein, 6 aa, Artificial Sequence
  Synthetic Construct
LDYPHV

SEQ ID NO: 1180 - protein, 6 aa, Artificial Sequence
  Synthetic Construct
LDYSPV

SEQ ID NO: 1181 - protein, 6 aa, Artificial Sequence
  Synthetic Construct
LDYVEI

SEQ ID NO: 1182 - protein, 6 aa, Artificial Sequence
  Synthetic Construct
LDYWGI

SEQ ID NO: 1183 - protein, 6 aa, Artificial Sequence
  Synthetic Construct
LEYAPV

SEQ ID NO: 1184 - protein, 6 aa, Artificial Sequence
  Synthetic Construct
LEYIPL

SEQ ID NO: 1185 - protein, 6 aa, Artificial Sequence
  Synthetic Construct
LEYKTI

SEQ ID NO: 1186 - protein, 6 aa, Artificial Sequence
  Synthetic Construct
LEYLCL

SEQ ID NO: 1187 - protein, 6 aa, Artificial Sequence
  Synthetic Construct
LEYLKL

SEQ ID NO: 1188 - protein, 6 aa, Artificial Sequence
  Synthetic Construct
LEYLQI

SEQ ID NO: 1189 - protein, 6 aa, Artificial Sequence
  Synthetic Construct
LEYLQL

SEQ ID NO: 1190 - protein, 6 aa, Artificial Sequence
  Synthetic Construct
LEYQRL

SEQ ID NO: 1191 - protein, 6 aa, Artificial Sequence
  Synthetic Construct
LEYVDL

SEQ ID NO: 1192 - protein, 6 aa, Artificial Sequence
  Synthetic Construct
LEYVSV

SEQ ID NO: 1193 - protein, 6 aa, Artificial Sequence
  Synthetic Construct
LEYYQI

SEQ ID NO: 1194 - protein, 6 aa, Artificial Sequence
  Synthetic Construct
LFYAQL

SEQ ID NO: 1195 - protein, 6 aa, Artificial Sequence
  Synthetic Construct
LFYCSV

SEQ ID NO: 1196 - protein, 6 aa, Artificial Sequence
  Synthetic Construct
LFYERV

SEQ ID NO: 1197 - protein, 6 aa, Artificial Sequence
  Synthetic Construct
LFYGFL

SEQ ID NO: 1198 - protein, 6 aa, Artificial Sequence
  Synthetic Construct
LFYKYV

SEQ ID NO: 1199 - protein, 6 aa, Artificial Sequence
  Synthetic Construct
LFYLLL

SEQ ID NO: 1200 - protein, 6 aa, Artificial Sequence
  Synthetic Construct
LFYNKV

SEQ ID NO: 1201 - protein, 6 aa, Artificial Sequence
  Synthetic Construct
LFYRHL

SEQ ID NO: 1202 - protein, 6 aa, Artificial Sequence
  Synthetic Construct
LFYTLL

SEQ ID NO: 1203 - protein, 6 aa, Artificial Sequence
  Synthetic Construct
LFYWDV

SEQ ID NO: 1204 - protein, 6 aa, Artificial Sequence
  Synthetic Construct
LFYWKL

SEQ ID NO: 1205 - protein, 6 aa, Artificial Sequence
  Synthetic Construct
LGYGNV

SEQ ID NO: 1206 - protein, 6 aa, Artificial Sequence
  Synthetic Construct
LGYKEL

SEQ ID NO: 1207 - protein, 6 aa, Artificial Sequence
  Synthetic Construct
LGYLQL

SEQ ID NO: 1208 - protein, 6 aa, Artificial Sequence
  Synthetic Construct
LGYPLI

SEQ ID NO: 1209 - protein, 6 aa, Artificial Sequence
  Synthetic Construct
LGYPWV

SEQ ID NO: 1210 - protein, 6 aa, Artificial Sequence
  Synthetic Construct
LGYSAL

SEQ ID NO: 1211 - protein, 6 aa, Artificial Sequence
  Synthetic Construct
LGYSDL

SEQ ID NO: 1212 - protein, 6 aa, Artificial Sequence
  Synthetic Construct
LGYVTL

SEQ ID NO: 1213 - protein, 6 aa, Artificial Sequence
  Synthetic Construct
LHYAKI

SEQ ID NO: 1214 - protein, 6 aa, Artificial Sequence
  Synthetic Construct
LHYALV

SEQ ID NO: 1215 - protein, 6 aa, Artificial Sequence
  Synthetic Construct
LHYANL

SEQ ID NO: 1216 - protein, 6 aa, Artificial Sequence
  Synthetic Construct
LHYARL

SEQ ID NO: 1217 - protein, 6 aa, Artificial Sequence
  Synthetic Construct
LHYASI

SEQ ID NO: 1218 - protein, 6 aa, Artificial Sequence
  Synthetic Construct
LHYASL

SEQ ID NO: 1219 - protein, 6 aa, Artificial Sequence
  Synthetic Construct
LHYASV

SEQ ID NO: 1220 - protein, 6 aa, Artificial Sequence
  Synthetic Construct
LHYATI

SEQ ID NO: 1221 - protein, 6 aa, Artificial Sequence
  Synthetic Construct
LHYATL

SEQ ID NO: 1222 - protein, 6 aa, Artificial Sequence
  Synthetic Construct
LHYAVL

SEQ ID NO: 1223 - protein, 6 aa, Artificial Sequence
  Synthetic Construct
LHYDVV

SEQ ID NO: 1224 - protein, 6 aa, Artificial Sequence
  Synthetic Construct
LHYEGL

SEQ ID NO: 1225 - protein, 6 aa, Artificial Sequence
  Synthetic Construct
LHYETI

SEQ ID NO: 1226 - protein, 6 aa, Artificial Sequence
  Synthetic Construct
LHYFEI

SEQ ID NO: 1227 - protein, 6 aa, Artificial Sequence
  Synthetic Construct
LHYFVV

SEQ ID NO: 1228 - protein, 6 aa, Artificial Sequence
  Synthetic Construct
LHYGAI

SEQ ID NO: 1229 - protein, 6 aa, Artificial Sequence
  Synthetic Construct
LHYILI

SEQ ID NO: 1230 - protein, 6 aa, Artificial Sequence
  Synthetic Construct
LHYINL

SEQ ID NO: 1231 - protein, 6 aa, Artificial Sequence
  Synthetic Construct
LHYKRI

SEQ ID NO: 1232 - protein, 6 aa, Artificial Sequence
  Synthetic Construct
LHYLDL

SEQ ID NO: 1233 - protein, 6 aa, Artificial Sequence
  Synthetic Construct
LHYLNI

SEQ ID NO: 1234 - protein, 6 aa, Artificial Sequence
  Synthetic Construct
LHYLTI

SEQ ID NO: 1235 - protein, 6 aa, Artificial Sequence
  Synthetic Construct
LHYLVI

SEQ ID NO: 1236 - protein, 6 aa, Artificial Sequence
  Synthetic Construct
LHYMAI

SEQ ID NO: 1237 - protein, 6 aa, Artificial Sequence
  Synthetic Construct
LHYMII

SEQ ID NO: 1238 - protein, 6 aa, Artificial Sequence
  Synthetic Construct
LHYMNI

SEQ ID NO: 1239 - protein, 6 aa, Artificial Sequence
  Synthetic Construct
LHYMTI

SEQ ID NO: 1240 - protein, 6 aa, Artificial Sequence
  Synthetic Construct
LHYMTL

SEQ ID NO: 1241 - protein, 6 aa, Artificial Sequence
  Synthetic Construct
LHYMTV

SEQ ID NO: 1242 - protein, 6 aa, Artificial Sequence
  Synthetic Construct
LHYMVI

SEQ ID NO: 1243 - protein, 6 aa, Artificial Sequence
  Synthetic Construct
LHYNML

SEQ ID NO: 1244 - protein, 6 aa, Artificial Sequence
  Synthetic Construct
LHYPAL

SEQ ID NO: 1245 - protein, 6 aa, Artificial Sequence
  Synthetic Construct
LHYPDL

SEQ ID NO: 1246 - protein, 6 aa, Artificial Sequence
  Synthetic Construct
LHYPII

SEQ ID NO: 1247 - protein, 6 aa, Artificial Sequence
  Synthetic Construct
LHYPIL

SEQ ID NO: 1248 - protein, 6 aa, Artificial Sequence
  Synthetic Construct
LHYPLL

SEQ ID NO: 1249 - protein, 6 aa, Artificial Sequence
  Synthetic Construct
LHYPML

SEQ ID NO: 1250 - protein, 6 aa, Artificial Sequence
  Synthetic Construct
LHYPNV

SEQ ID NO: 1251 - protein, 6 aa, Artificial Sequence
  Synthetic Construct
LHYPSI

SEQ ID NO: 1252 - protein, 6 aa, Artificial Sequence
  Synthetic Construct
LHYPTI

SEQ ID NO: 1253 - protein, 6 aa, Artificial Sequence
  Synthetic Construct
LHYPTL

SEQ ID NO: 1254 - protein, 6 aa, Artificial Sequence
  Synthetic Construct
LHYPTV

SEQ ID NO: 1255 - protein, 6 aa, Artificial Sequence
  Synthetic Construct
LHYPVI

SEQ ID NO: 1256 - protein, 6 aa, Artificial Sequence
  Synthetic Construct
LHYPVL

SEQ ID NO: 1257 - protein, 6 aa, Artificial Sequence
  Synthetic Construct
LHYRII

SEQ ID NO: 1258 - protein, 6 aa, Artificial Sequence
  Synthetic Construct
LHYRTI

SEQ ID NO: 1259 - protein, 6 aa, Artificial Sequence
  Synthetic Construct
LHYSII

SEQ ID NO: 1260 - protein, 6 aa, Artificial Sequence
  Synthetic Construct
LHYSSI

SEQ ID NO: 1261 - protein, 6 aa, Artificial Sequence
  Synthetic Construct
LHYSTI

SEQ ID NO: 1262 - protein, 6 aa, Artificial Sequence
  Synthetic Construct
LHYSTL

SEQ ID NO: 1263 - protein, 6 aa, Artificial Sequence
  Synthetic Construct
LHYSVI

SEQ ID NO: 1264 - protein, 6 aa, Artificial Sequence
  Synthetic Construct
LHYTAI

SEQ ID NO: 1265 - protein, 6 aa, Artificial Sequence
  Synthetic Construct
LHYTAL

SEQ ID NO: 1266 - protein, 6 aa, Artificial Sequence
  Synthetic Construct
LHYTII

SEQ ID NO: 1267 - protein, 6 aa, Artificial Sequence
  Synthetic Construct
LHYTKV

SEQ ID NO: 1268 - protein, 6 aa, Artificial Sequence
  Synthetic Construct
LHYTLI

SEQ ID NO: 1269 - protein, 6 aa, Artificial Sequence
  Synthetic Construct
LHYTSI

SEQ ID NO: 1270 - protein, 6 aa, Artificial Sequence
  Synthetic Construct
LHYTTI

SEQ ID NO: 1271 - protein, 6 aa, Artificial Sequence
  Synthetic Construct
LHYTTV

SEQ ID NO: 1272 - protein, 6 aa, Artificial Sequence
  Synthetic Construct
LHYTVI

SEQ ID NO: 1273 - protein, 6 aa, Artificial Sequence
  Synthetic Construct
LHYTVL

SEQ ID NO: 1274 - protein, 6 aa, Artificial Sequence
  Synthetic Construct
LHYTVV

SEQ ID NO: 1275 - protein, 6 aa, Artificial Sequence
  Synthetic Construct
LHYVSI

SEQ ID NO: 1276 - protein, 6 aa, Artificial Sequence
  Synthetic Construct
LHYVTI

SEQ ID NO: 1277 - protein, 6 aa, Artificial Sequence
  Synthetic Construct
LHYVVI

SEQ ID NO: 1278 - protein, 6 aa, Artificial Sequence
  Synthetic Construct
LIYEKL

SEQ ID NO: 1279 - protein, 6 aa, Artificial Sequence
  Synthetic Construct
LIYENV

SEQ ID NO: 1280 - protein, 6 aa, Artificial Sequence
  Synthetic Construct
LIYKDL

SEQ ID NO: 1281 - protein, 6 aa, Artificial Sequence
  Synthetic Construct
LIYNSL

SEQ ID NO: 1282 - protein, 6 aa, Artificial Sequence
  Synthetic Construct
LIYSGL

SEQ ID NO: 1283 - protein, 6 aa, Artificial Sequence
  Synthetic Construct
LIYTLL

SEQ ID NO: 1284 - protein, 6 aa, Artificial Sequence
  Synthetic Construct
LIYTVL

SEQ ID NO: 1285 - protein, 6 aa, Artificial Sequence
  Synthetic Construct
LIYWEI

SEQ ID NO: 1286 - protein, 6 aa, Artificial Sequence
  Synthetic Construct
LKYCEL

SEQ ID NO: 1287 - protein, 6 aa, Artificial Sequence
  Synthetic Construct
LKYDKL

SEQ ID NO: 1288 - protein, 6 aa, Artificial Sequence
  Synthetic Construct
LKYESL

SEQ ID NO: 1289 - protein, 6 aa, Artificial Sequence
  Synthetic Construct
LKYFTI

SEQ ID NO: 1290 - protein, 6 aa, Artificial Sequence
  Synthetic Construct
LKYHTV

SEQ ID NO: 1291 - protein, 6 aa, Artificial Sequence
  Synthetic Construct
LKYILL

SEQ ID NO: 1292 - protein, 6 aa, Artificial Sequence
  Synthetic Construct
LKYIPI

SEQ ID NO: 1293 - protein, 6 aa, Artificial Sequence
  Synthetic Construct
LKYKHV

SEQ ID NO: 1294 - protein, 6 aa, Artificial Sequence
  Synthetic Construct
LKYLYL

SEQ ID NO: 1295 - protein, 6 aa, Artificial Sequence
  Synthetic Construct
LKYMEV

SEQ ID NO: 1296 - protein, 6 aa, Artificial Sequence
  Synthetic Construct
LKYMTL

SEQ ID NO: 1297 - protein, 6 aa, Artificial Sequence
  Synthetic Construct
LKYPAI

SEQ ID NO: 1298 - protein, 6 aa, Artificial Sequence
  Synthetic Construct
LKYPDV

SEQ ID NO: 1299 - protein, 6 aa, Artificial Sequence
  Synthetic Construct
LKYPEL

SEQ ID NO: 1300 - protein, 6 aa, Artificial Sequence
  Synthetic Construct
LKYQPI

SEQ ID NO: 1301 - protein, 6 aa, Artificial Sequence
  Synthetic Construct
LKYRGL

SEQ ID NO: 1302 - protein, 6 aa, Artificial Sequence
  Synthetic Construct
LKYRLL

SEQ ID NO: 1303 - protein, 6 aa, Artificial Sequence
  Synthetic Construct
LLYADL

SEQ ID NO: 1304 - protein, 6 aa, Artificial Sequence
  Synthetic Construct
LLYAPL

SEQ ID NO: 1305 - protein, 6 aa, Artificial Sequence
  Synthetic Construct
LLYAVV

SEQ ID NO: 1306 - protein, 6 aa, Artificial Sequence
  Synthetic Construct
LLYCAI

SEQ ID NO: 1307 - protein, 6 aa, Artificial Sequence
  Synthetic Construct
LLYEHV

SEQ ID NO: 1308 - protein, 6 aa, Artificial Sequence
  Synthetic Construct
LLYELL

SEQ ID NO: 1309 - protein, 6 aa, Artificial Sequence
  Synthetic Construct
LLYEQL

SEQ ID NO: 1310 - protein, 6 aa, Artificial Sequence
  Synthetic Construct
LLYGQI

SEQ ID NO: 1311 - protein, 6 aa, Artificial Sequence
  Synthetic Construct
LLYIRL

SEQ ID NO: 1312 - protein, 6 aa, Artificial Sequence
  Synthetic Construct
LLYKAL

SEQ ID NO: 1313 - protein, 6 aa, Artificial Sequence
  Synthetic Construct
LLYKFL

SEQ ID NO: 1314 - protein, 6 aa, Artificial Sequence
  Synthetic Construct
LLYKLL

SEQ ID NO: 1315 - protein, 6 aa, Artificial Sequence
  Synthetic Construct
LLYKTV

SEQ ID NO: 1316 - protein, 6 aa, Artificial Sequence
  Synthetic Construct
LLYMVV

SEQ ID NO: 1317 - protein, 6 aa, Artificial Sequence
  Synthetic Construct
LLYNAI

SEQ ID NO: 1318 - protein, 6 aa, Artificial Sequence
  Synthetic Construct
LLYNIV

SEQ ID NO: 1319 - protein, 6 aa, Artificial Sequence
  Synthetic Construct
LLYNVI

SEQ ID NO: 1320 - protein, 6 aa, Artificial Sequence
  Synthetic Construct
LLYPAI

SEQ ID NO: 1321 - protein, 6 aa, Artificial Sequence
  Synthetic Construct
LLYPLI

SEQ ID NO: 1322 - protein, 6 aa, Artificial Sequence
  Synthetic Construct
LLYPNI

SEQ ID NO: 1323 - protein, 6 aa, Artificial Sequence
  Synthetic Construct
LLYPSL

SEQ ID NO: 1324 - protein, 6 aa, Artificial Sequence
  Synthetic Construct
LLYPTI

SEQ ID NO: 1325 - protein, 6 aa, Artificial Sequence
  Synthetic Construct
LLYPVI

SEQ ID NO: 1326 - protein, 6 aa, Artificial Sequence
  Synthetic Construct
LLYPVV

SEQ ID NO: 1327 - protein, 6 aa, Artificial Sequence
  Synthetic Construct
LLYQIL

SEQ ID NO: 1328 - protein, 6 aa, Artificial Sequence
  Synthetic Construct
LLYQNI

SEQ ID NO: 1329 - protein, 6 aa, Artificial Sequence
  Synthetic Construct
LLYRLL

SEQ ID NO: 1330 - protein, 6 aa, Artificial Sequence
  Synthetic Construct
LLYRVI

SEQ ID NO: 1331 - protein, 6 aa, Artificial Sequence
  Synthetic Construct
LLYSII

SEQ ID NO: 1332 - protein, 6 aa, Artificial Sequence
  Synthetic Construct
LLYSLI

SEQ ID NO: 1333 - protein, 6 aa, Artificial Sequence
  Synthetic Construct
LLYSPV

SEQ ID NO: 1334 - protein, 6 aa, Artificial Sequence
  Synthetic Construct
LLYSRL

SEQ ID NO: 1335 - protein, 6 aa, Artificial Sequence
  Synthetic Construct
LLYSTI

SEQ ID NO: 1336 - protein, 6 aa, Artificial Sequence
  Synthetic Construct
LLYSVI

SEQ ID NO: 1337 - protein, 6 aa, Artificial Sequence
  Synthetic Construct
LLYSVV

SEQ ID NO: 1338 - protein, 6 aa, Artificial Sequence
  Synthetic Construct
LLYTTI

SEQ ID NO: 1339 - protein, 6 aa, Artificial Sequence
  Synthetic Construct
LLYTVI

SEQ ID NO: 1340 - protein, 6 aa, Artificial Sequence
  Synthetic Construct
LLYTVV

SEQ ID NO: 1341 - protein, 6 aa, Artificial Sequence
  Synthetic Construct
LLYVII

SEQ ID NO: 1342 - protein, 6 aa, Artificial Sequence
  Synthetic Construct
LLYVIL

SEQ ID NO: 1343 - protein, 6 aa, Artificial Sequence
  Synthetic Construct
LLYVTI

SEQ ID NO: 1344 - protein, 6 aa, Artificial Sequence
  Synthetic Construct
LLYWGI

SEQ ID NO: 1345 - protein, 6 aa, Artificial Sequence
  Synthetic Construct
LLYYLL

SEQ ID NO: 1346 - protein, 6 aa, Artificial Sequence
  Synthetic Construct
LLYYVI

SEQ ID NO: 1347 - protein, 6 aa, Artificial Sequence
  Synthetic Construct
LMYDNV

SEQ ID NO: 1348 - protein, 6 aa, Artificial Sequence
  Synthetic Construct
LMYMVV

SEQ ID NO: 1349 - protein, 6 aa, Artificial Sequence
  Synthetic Construct
LMYQEL

SEQ ID NO: 1350 - protein, 6 aa, Artificial Sequence
  Synthetic Construct
LMYRGI

SEQ ID NO: 1351 - protein, 6 aa, Artificial Sequence
  Synthetic Construct
LNYACL

SEQ ID NO: 1352 - protein, 6 aa, Artificial Sequence
  Synthetic Construct
LNYATI

SEQ ID NO: 1353 - protein, 6 aa, Artificial Sequence
  Synthetic Construct
LNYEVI

SEQ ID NO: 1354 - protein, 6 aa, Artificial Sequence
  Synthetic Construct
LNYGDL

SEQ ID NO: 1355 - protein, 6 aa, Artificial Sequence
  Synthetic Construct
LNYHKL

SEQ ID NO: 1356 - protein, 6 aa, Artificial Sequence
  Synthetic Construct
LNYMVL

SEQ ID NO: 1357 - protein, 6 aa, Artificial Sequence
  Synthetic Construct
LNYNIV

SEQ ID NO: 1358 - protein, 6 aa, Artificial Sequence
  Synthetic Construct
LNYPVI

SEQ ID NO: 1359 - protein, 6 aa, Artificial Sequence
  Synthetic Construct
LNYQMI

SEQ ID NO: 1360 - protein, 6 aa, Artificial Sequence
  Synthetic Construct
LNYSGV

SEQ ID NO: 1361 - protein, 6 aa, Artificial Sequence
  Synthetic Construct
LNYSVI

SEQ ID NO: 1362 - protein, 6 aa, Artificial Sequence
  Synthetic Construct
LNYTIL

SEQ ID NO: 1363 - protein, 6 aa, Artificial Sequence
  Synthetic Construct
LNYTTI

SEQ ID NO: 1364 - protein, 6 aa, Artificial Sequence
  Synthetic Construct
LNYVPI

SEQ ID NO: 1365 - protein, 6 aa, Artificial Sequence
  Synthetic Construct
LPYADL

SEQ ID NO: 1366 - protein, 6 aa, Artificial Sequence
  Synthetic Construct
LPYALL

SEQ ID NO: 1367 - protein, 6 aa, Artificial Sequence
  Synthetic Construct
LPYFNI

SEQ ID NO: 1368 - protein, 6 aa, Artificial Sequence
  Synthetic Construct
LPYFNV

SEQ ID NO: 1369 - protein, 6 aa, Artificial Sequence
  Synthetic Construct
LPYHDL

SEQ ID NO: 1370 - protein, 6 aa, Artificial Sequence
  Synthetic Construct
LPYKLI

SEQ ID NO: 1371 - protein, 6 aa, Artificial Sequence
  Synthetic Construct
LPYKTL

SEQ ID NO: 1372 - protein, 6 aa, Artificial Sequence
  Synthetic Construct
LPYLGV

SEQ ID NO: 1373 - protein, 6 aa, Artificial Sequence
  Synthetic Construct
LPYLKV

SEQ ID NO: 1374 - protein, 6 aa, Artificial Sequence
  Synthetic Construct
LPYPAL

SEQ ID NO: 1375 - protein, 6 aa, Artificial Sequence
  Synthetic Construct
LPYQVV

SEQ ID NO: 1376 - protein, 6 aa, Artificial Sequence
  Synthetic Construct
LPYRTV

SEQ ID NO: 1377 - protein, 6 aa, Artificial Sequence
  Synthetic Construct
LPYVEI

SEQ ID NO: 1378 - protein, 6 aa, Artificial Sequence
  Synthetic Construct
LPYYDL

SEQ ID NO: 1379 - protein, 6 aa, Artificial Sequence
  Synthetic Construct
LQYASL

SEQ ID NO: 1380 - protein, 6 aa, Artificial Sequence
  Synthetic Construct
LQYERI

SEQ ID NO: 1381 - protein, 6 aa, Artificial Sequence
  Synthetic Construct
LQYFAV

SEQ ID NO: 1382 - protein, 6 aa, Artificial Sequence
  Synthetic Construct
LQYFSI

SEQ ID NO: 1383 - protein, 6 aa, Artificial Sequence
  Synthetic Construct
LQYHNI

SEQ ID NO: 1384 - protein, 6 aa, Artificial Sequence
  Synthetic Construct
LQYIGL

SEQ ID NO: 1385 - protein, 6 aa, Artificial Sequence
  Synthetic Construct
LQYIKI

SEQ ID NO: 1386 - protein, 6 aa, Artificial Sequence
  Synthetic Construct
LQYLSL

SEQ ID NO: 1387 - protein, 6 aa, Artificial Sequence
  Synthetic Construct
LQYMIV

SEQ ID NO: 1388 - protein, 6 aa, Artificial Sequence
  Synthetic Construct
LQYPAI

SEQ ID NO: 1389 - protein, 6 aa, Artificial Sequence
  Synthetic Construct
LQYPLL

SEQ ID NO: 1390 - protein, 6 aa, Artificial Sequence
  Synthetic Construct
LQYPLV

SEQ ID NO: 1391 - protein, 6 aa, Artificial Sequence
  Synthetic Construct
LQYPSI

SEQ ID NO: 1392 - protein, 6 aa, Artificial Sequence
  Synthetic Construct
LQYPTL

SEQ ID NO: 1393 - protein, 6 aa, Artificial Sequence
  Synthetic Construct
LQYPVL

SEQ ID NO: 1394 - protein, 6 aa, Artificial Sequence
  Synthetic Construct
LQYRAV

SEQ ID NO: 1395 - protein, 6 aa, Artificial Sequence
  Synthetic Construct
LQYSAI

SEQ ID NO: 1396 - protein, 6 aa, Artificial Sequence
  Synthetic Construct
LQYSSI

SEQ ID NO: 1397 - protein, 6 aa, Artificial Sequence
  Synthetic Construct
LQYSVI

SEQ ID NO: 1398 - protein, 6 aa, Artificial Sequence
  Synthetic Construct
LQYTIL

SEQ ID NO: 1399 - protein, 6 aa, Artificial Sequence
  Synthetic Construct
LQYTLI

SEQ ID NO: 1400 - protein, 6 aa, Artificial Sequence
  Synthetic Construct
LQYTMI

SEQ ID NO: 1401 - protein, 6 aa, Artificial Sequence
  Synthetic Construct
LQYYQV

SEQ ID NO: 1402 - protein, 6 aa, Artificial Sequence
  Synthetic Construct
LRYAAV

SEQ ID NO: 1403 - protein, 6 aa, Artificial Sequence
  Synthetic Construct
LRYAGL

SEQ ID NO: 1404 - protein, 6 aa, Artificial Sequence
  Synthetic Construct
LRYAPL

SEQ ID NO: 1405 - protein, 6 aa, Artificial Sequence
  Synthetic Construct
LRYASI

SEQ ID NO: 1406 - protein, 6 aa, Artificial Sequence
  Synthetic Construct
LRYATI

SEQ ID NO: 1407 - protein, 6 aa, Artificial Sequence
  Synthetic Construct
LRYATV

SEQ ID NO: 1408 - protein, 6 aa, Artificial Sequence
  Synthetic Construct
LRYAVL

SEQ ID NO: 1409 - protein, 6 aa, Artificial Sequence
  Synthetic Construct
LRYCGI

SEQ ID NO: 1410 - protein, 6 aa, Artificial Sequence
  Synthetic Construct
LRYELL

SEQ ID NO: 1411 - protein, 6 aa, Artificial Sequence
  Synthetic Construct
LRYETL

SEQ ID NO: 1412 - protein, 6 aa, Artificial Sequence
  Synthetic Construct
LRYGAL

SEQ ID NO: 1413 - protein, 6 aa, Artificial Sequence
  Synthetic Construct
LRYGPI

SEQ ID NO: 1414 - protein, 6 aa, Artificial Sequence
  Synthetic Construct
LRYGTL

SEQ ID NO: 1415 - protein, 6 aa, Artificial Sequence
  Synthetic Construct
LRYHHI

SEQ ID NO: 1416 - protein, 6 aa, Artificial Sequence
  Synthetic Construct
LRYHSI

SEQ ID NO: 1417 - protein, 6 aa, Artificial Sequence
  Synthetic Construct
LRYHVL

SEQ ID NO: 1418 - protein, 6 aa, Artificial Sequence
  Synthetic Construct
LRYIAI

SEQ ID NO: 1419 - protein, 6 aa, Artificial Sequence
  Synthetic Construct
LRYIFV

SEQ ID NO: 1420 - protein, 6 aa, Artificial Sequence
  Synthetic Construct
LRYITV

SEQ ID NO: 1421 - protein, 6 aa, Artificial Sequence
  Synthetic Construct
LRYKEV

SEQ ID NO: 1422 - protein, 6 aa, Artificial Sequence
  Synthetic Construct
LRYKKL

SEQ ID NO: 1423 - protein, 6 aa, Artificial Sequence
  Synthetic Construct
LRYKMV

SEQ ID NO: 1424 - protein, 6 aa, Artificial Sequence
  Synthetic Construct
LRYKSL

SEQ ID NO: 1425 - protein, 6 aa, Artificial Sequence
  Synthetic Construct
LRYKVI

SEQ ID NO: 1426 - protein, 6 aa, Artificial Sequence
  Synthetic Construct
LRYLAI

SEQ ID NO: 1427 - protein, 6 aa, Artificial Sequence
  Synthetic Construct
LRYLDL

SEQ ID NO: 1428 - protein, 6 aa, Artificial Sequence
  Synthetic Construct
LRYLTI

SEQ ID NO: 1429 - protein, 6 aa, Artificial Sequence
  Synthetic Construct
LRYLTV

SEQ ID NO: 1430 - protein, 6 aa, Artificial Sequence
  Synthetic Construct
LRYMSI

SEQ ID NO: 1431 - protein, 6 aa, Artificial Sequence
  Synthetic Construct
LRYMVI

SEQ ID NO: 1432 - protein, 6 aa, Artificial Sequence
  Synthetic Construct
LRYNCI

SEQ ID NO: 1433 - protein, 6 aa, Artificial Sequence
  Synthetic Construct
LRYNGL

SEQ ID NO: 1434 - protein, 6 aa, Artificial Sequence
  Synthetic Construct
LRYNII

SEQ ID NO: 1435 - protein, 6 aa, Artificial Sequence
  Synthetic Construct
LRYNIL

SEQ ID NO: 1436 - protein, 6 aa, Artificial Sequence
  Synthetic Construct
LRYNKI

SEQ ID NO: 1437 - protein, 6 aa, Artificial Sequence
  Synthetic Construct
LRYNSL

SEQ ID NO: 1438 - protein, 6 aa, Artificial Sequence
  Synthetic Construct
LRYNVI

SEQ ID NO: 1439 - protein, 6 aa, Artificial Sequence
  Synthetic Construct
LRYNVL

SEQ ID NO: 1440 - protein, 6 aa, Artificial Sequence
  Synthetic Construct
LRYPFL

SEQ ID NO: 1441 - protein, 6 aa, Artificial Sequence
  Synthetic Construct
LRYPII

SEQ ID NO: 1442 - protein, 6 aa, Artificial Sequence
  Synthetic Construct
LRYPIL

SEQ ID NO: 1443 - protein, 6 aa, Artificial Sequence
  Synthetic Construct
LRYPLL

SEQ ID NO: 1444 - protein, 6 aa, Artificial Sequence
  Synthetic Construct
LRYPNI

SEQ ID NO: 1445 - protein, 6 aa, Artificial Sequence
  Synthetic Construct
LRYPSI

SEQ ID NO: 1446 - protein, 6 aa, Artificial Sequence
  Synthetic Construct
LRYPTI

SEQ ID NO: 1447 - protein, 6 aa, Artificial Sequence
  Synthetic Construct
LRYPTL

SEQ ID NO: 1448 - protein, 6 aa, Artificial Sequence
  Synthetic Construct
LRYPVI

SEQ ID NO: 1449 - protein, 6 aa, Artificial Sequence
  Synthetic Construct
LRYPVL

SEQ ID NO: 1450 - protein, 6 aa, Artificial Sequence
  Synthetic Construct
LRYQKL

SEQ ID NO: 1451 - protein, 6 aa, Artificial Sequence
  Synthetic Construct
LRYQMI

SEQ ID NO: 1452 - protein, 6 aa, Artificial Sequence
  Synthetic Construct
LRYQNL

SEQ ID NO: 1453 - protein, 6 aa, Artificial Sequence
  Synthetic Construct
LRYRLI

SEQ ID NO: 1454 - protein, 6 aa, Artificial Sequence
  Synthetic Construct
LRYRVI

SEQ ID NO: 1455 - protein, 6 aa, Artificial Sequence
  Synthetic Construct
LRYSAI

SEQ ID NO: 1456 - protein, 6 aa, Artificial Sequence
  Synthetic Construct
LRYSDL

SEQ ID NO: 1457 - protein, 6 aa, Artificial Sequence
  Synthetic Construct
LRYSII

SEQ ID NO: 1458 - protein, 6 aa, Artificial Sequence
  Synthetic Construct
LRYSMI

SEQ ID NO: 1459 - protein, 6 aa, Artificial Sequence
  Synthetic Construct
LRYSSI

SEQ ID NO: 1460 - protein, 6 aa, Artificial Sequence
  Synthetic Construct
LRYSTI

SEQ ID NO: 1461 - protein, 6 aa, Artificial Sequence
  Synthetic Construct
LRYSTL

SEQ ID NO: 1462 - protein, 6 aa, Artificial Sequence
  Synthetic Construct
LRYSVI

SEQ ID NO: 1463 - protein, 6 aa, Artificial Sequence
  Synthetic Construct
LRYSVL

SEQ ID NO: 1464 - protein, 6 aa, Artificial Sequence
  Synthetic Construct
LRYSVV

SEQ ID NO: 1465 - protein, 6 aa, Artificial Sequence
  Synthetic Construct
LRYTAI

SEQ ID NO: 1466 - protein, 6 aa, Artificial Sequence
  Synthetic Construct
LRYTIL

SEQ ID NO: 1467 - protein, 6 aa, Artificial Sequence
  Synthetic Construct
LRYTLI

SEQ ID NO: 1468 - protein, 6 aa, Artificial Sequence
  Synthetic Construct
LRYTMI

SEQ ID NO: 1469 - protein, 6 aa, Artificial Sequence
  Synthetic Construct
LRYTNL

SEQ ID NO: 1470 - protein, 6 aa, Artificial Sequence
  Synthetic Construct
LRYTPV

SEQ ID NO: 1471 - protein, 6 aa, Artificial Sequence
  Synthetic Construct
LRYTSI

SEQ ID NO: 1472 - protein, 6 aa, Artificial Sequence
  Synthetic Construct
LRYTSV

SEQ ID NO: 1473 - protein, 6 aa, Artificial Sequence
  Synthetic Construct
LRYTTI

SEQ ID NO: 1474 - protein, 6 aa, Artificial Sequence
  Synthetic Construct
LRYTTV

SEQ ID NO: 1475 - protein, 6 aa, Artificial Sequence
  Synthetic Construct
LRYTVI

SEQ ID NO: 1476 - protein, 6 aa, Artificial Sequence
  Synthetic Construct
LRYVEV

SEQ ID NO: 1477 - protein, 6 aa, Artificial Sequence
  Synthetic Construct
LRYVTI

SEQ ID NO: 1478 - protein, 6 aa, Artificial Sequence
  Synthetic Construct
LRYVTV

SEQ ID NO: 1479 - protein, 6 aa, Artificial Sequence
  Synthetic Construct
LSYDSL

SEQ ID NO: 1480 - protein, 6 aa, Artificial Sequence
  Synthetic Construct
LSYEDV

SEQ ID NO: 1481 - protein, 6 aa, Artificial Sequence
  Synthetic Construct
LSYFGV

SEQ ID NO: 1482 - protein, 6 aa, Artificial Sequence
  Synthetic Construct
LSYILI

SEQ ID NO: 1483 - protein, 6 aa, Artificial Sequence
  Synthetic Construct
LSYISV

SEQ ID NO: 1484 - protein, 6 aa, Artificial Sequence
  Synthetic Construct
LSYKQV

SEQ ID NO: 1485 - protein, 6 aa, Artificial Sequence
  Synthetic Construct
LSYKRL

SEQ ID NO: 1486 - protein, 6 aa, Artificial Sequence
  Synthetic Construct
LSYLDV

SEQ ID NO: 1487 - protein, 6 aa, Artificial Sequence
  Synthetic Construct
LSYMDL

SEQ ID NO: 1488 - protein, 6 aa, Artificial Sequence
  Synthetic Construct
LSYNAL

SEQ ID NO: 1489 - protein, 6 aa, Artificial Sequence
  Synthetic Construct
LSYNDL

SEQ ID NO: 1490 - protein, 6 aa, Artificial Sequence
  Synthetic Construct
LSYNKL

SEQ ID NO: 1491 - protein, 6 aa, Artificial Sequence
  Synthetic Construct
LSYNQL

SEQ ID NO: 1492 - protein, 6 aa, Artificial Sequence
  Synthetic Construct
LSYPVL

SEQ ID NO: 1493 - protein, 6 aa, Artificial Sequence
  Synthetic Construct
LSYQEV

SEQ ID NO: 1494 - protein, 6 aa, Artificial Sequence
  Synthetic Construct
LSYQPV

SEQ ID NO: 1495 - protein, 6 aa, Artificial Sequence
  Synthetic Construct
LSYQTI

SEQ ID NO: 1496 - protein, 6 aa, Artificial Sequence
  Synthetic Construct
LSYRSL

SEQ ID NO: 1497 - protein, 6 aa, Artificial Sequence
  Synthetic Construct
LSYRSV

SEQ ID NO: 1498 - protein, 6 aa, Artificial Sequence
  Synthetic Construct
LSYSII

SEQ ID NO: 1499 - protein, 6 aa, Artificial Sequence
  Synthetic Construct
LSYSSL

SEQ ID NO: 1500 - protein, 6 aa, Artificial Sequence
  Synthetic Construct
LSYSTL

SEQ ID NO: 1501 - protein, 6 aa, Artificial Sequence
  Synthetic Construct
LSYTKV

SEQ ID NO: 1502 - protein, 6 aa, Artificial Sequence
  Synthetic Construct
LSYTSI

SEQ ID NO: 1503 - protein, 6 aa, Artificial Sequence
  Synthetic Construct
LSYTTI

SEQ ID NO: 1504 - protein, 6 aa, Artificial Sequence
  Synthetic Construct
LSYVLI

SEQ ID NO: 1505 - protein, 6 aa, Artificial Sequence
  Synthetic Construct
LTYADL

SEQ ID NO: 1506 - protein, 6 aa, Artificial Sequence
  Synthetic Construct
LTYAEL

SEQ ID NO: 1507 - protein, 6 aa, Artificial Sequence
  Synthetic Construct
LTYAQV

SEQ ID NO: 1508 - protein, 6 aa, Artificial Sequence
  Synthetic Construct
LTYARL

SEQ ID NO: 1509 - protein, 6 aa, Artificial Sequence
  Synthetic Construct
LTYCDL

SEQ ID NO: 1510 - protein, 6 aa, Artificial Sequence
  Synthetic Construct
LTYCGL

SEQ ID NO: 1511 - protein, 6 aa, Artificial Sequence
  Synthetic Construct
LTYCVL

SEQ ID NO: 1512 - protein, 6 aa, Artificial Sequence
  Synthetic Construct
LTYEEL

SEQ ID NO: 1513 - protein, 6 aa, Artificial Sequence
  Synthetic Construct
LTYEFL

SEQ ID NO: 1514 - protein, 6 aa, Artificial Sequence
  Synthetic Construct
LTYGEV

SEQ ID NO: 1515 - protein, 6 aa, Artificial Sequence
  Synthetic Construct
LTYGRL

SEQ ID NO: 1516 - protein, 6 aa, Artificial Sequence
  Synthetic Construct
LTYKAL

SEQ ID NO: 1517 - protein, 6 aa, Artificial Sequence
  Synthetic Construct
LTYLRL

SEQ ID NO: 1518 - protein, 6 aa, Artificial Sequence
  Synthetic Construct
LTYMTL

SEQ ID NO: 1519 - protein, 6 aa, Artificial Sequence
  Synthetic Construct
LTYNTL

SEQ ID NO: 1520 - protein, 6 aa, Artificial Sequence
  Synthetic Construct
LTYPGI

SEQ ID NO: 1521 - protein, 6 aa, Artificial Sequence
  Synthetic Construct
LTYQSV

SEQ ID NO: 1522 - protein, 6 aa, Artificial Sequence
  Synthetic Construct
LTYSSV

SEQ ID NO: 1523 - protein, 6 aa, Artificial Sequence
  Synthetic Construct
LTYTTV

SEQ ID NO: 1524 - protein, 6 aa, Artificial Sequence
  Synthetic Construct
LVYDAI

SEQ ID NO: 1525 - protein, 6 aa, Artificial Sequence
  Synthetic Construct
LVYDKL

SEQ ID NO: 1526 - protein, 6 aa, Artificial Sequence
  Synthetic Construct
LVYDLV

SEQ ID NO: 1527 - protein, 6 aa, Artificial Sequence
  Synthetic Construct
LVYENL

SEQ ID NO: 1528 - protein, 6 aa, Artificial Sequence
  Synthetic Construct
LVYGQL

SEQ ID NO: 1529 - protein, 6 aa, Artificial Sequence
  Synthetic Construct
LVYHKL

SEQ ID NO: 1530 - protein, 6 aa, Artificial Sequence
  Synthetic Construct
LVYQEV

SEQ ID NO: 1531 - protein, 6 aa, Artificial Sequence
  Synthetic Construct
LVYRKV

SEQ ID NO: 1532 - protein, 6 aa, Artificial Sequence
  Synthetic Construct
LVYRNL

SEQ ID NO: 1533 - protein, 6 aa, Artificial Sequence
  Synthetic Construct
LVYSEI

SEQ ID NO: 1534 - protein, 6 aa, Artificial Sequence
  Synthetic Construct
LVYTNV

SEQ ID NO: 1535 - protein, 6 aa, Artificial Sequence
  Synthetic Construct
LVYWEI

SEQ ID NO: 1536 - protein, 6 aa, Artificial Sequence
  Synthetic Construct
LVYWKL

SEQ ID NO: 1537 - protein, 6 aa, Artificial Sequence
  Synthetic Construct
LVYWRL

SEQ ID NO: 1538 - protein, 6 aa, Artificial Sequence
  Synthetic Construct
LWYEGL

SEQ ID NO: 1539 - protein, 6 aa, Artificial Sequence
  Synthetic Construct
LWYKYI

SEQ ID NO: 1540 - protein, 6 aa, Artificial Sequence
  Synthetic Construct
LWYNHI

SEQ ID NO: 1541 - protein, 6 aa, Artificial Sequence
  Synthetic Construct
LWYTMI

SEQ ID NO: 1542 - protein, 6 aa, Artificial Sequence
  Synthetic Construct
LYYCQL

SEQ ID NO: 1543 - protein, 6 aa, Artificial Sequence
  Synthetic Construct
LYYGDL

SEQ ID NO: 1544 - protein, 6 aa, Artificial Sequence
  Synthetic Construct
LYYKKV

SEQ ID NO: 1545 - protein, 6 aa, Artificial Sequence
  Synthetic Construct
LYYLLI

SEQ ID NO: 1546 - protein, 6 aa, Artificial Sequence
  Synthetic Construct
LYYPKV

SEQ ID NO: 1547 - protein, 6 aa, Artificial Sequence
  Synthetic Construct
LYYRRV

SEQ ID NO: 1548 - protein, 6 aa, Artificial Sequence
  Synthetic Construct
LYYSTI

SEQ ID NO: 1549 - protein, 6 aa, Artificial Sequence
  Synthetic Construct
LYYVRI

SEQ ID NO: 1550 - protein, 6 aa, Artificial Sequence
  Synthetic Construct
LYYVVI

SEQ ID NO: 1551 - protein, 6 aa, Artificial Sequence
  Synthetic Construct
SAYATL

SEQ ID NO: 1552 - protein, 6 aa, Artificial Sequence
  Synthetic Construct
SAYCPL

SEQ ID NO: 1553 - protein, 6 aa, Artificial Sequence
  Synthetic Construct
SAYPAL

SEQ ID NO: 1554 - protein, 6 aa, Artificial Sequence
  Synthetic Construct
SAYQAL

SEQ ID NO: 1555 - protein, 6 aa, Artificial Sequence
  Synthetic Construct
SAYQTI

SEQ ID NO: 1556 - protein, 6 aa, Artificial Sequence
  Synthetic Construct
SAYRSV

SEQ ID NO: 1557 - protein, 6 aa, Artificial Sequence
  Synthetic Construct
SAYTAL

SEQ ID NO: 1558 - protein, 6 aa, Artificial Sequence
  Synthetic Construct
SAYTPL

SEQ ID NO: 1559 - protein, 6 aa, Artificial Sequence
  Synthetic Construct
SAYVVL

SEQ ID NO: 1560 - protein, 6 aa, Artificial Sequence
  Synthetic Construct
SCYAAV

SEQ ID NO: 1561 - protein, 6 aa, Artificial Sequence
  Synthetic Construct
SCYCII

SEQ ID NO: 1562 - protein, 6 aa, Artificial Sequence
  Synthetic Construct
SCYCLL

SEQ ID NO: 1563 - protein, 6 aa, Artificial Sequence
  Synthetic Construct
SCYDFL

SEQ ID NO: 1564 - protein, 6 aa, Artificial Sequence
  Synthetic Construct
SCYEEL

SEQ ID NO: 1565 - protein, 6 aa, Artificial Sequence
  Synthetic Construct
SCYEKI

SEQ ID NO: 1566 - protein, 6 aa, Artificial Sequence
  Synthetic Construct
SCYHIL

SEQ ID NO: 1567 - protein, 6 aa, Artificial Sequence
  Synthetic Construct
SCYPYI

SEQ ID NO: 1568 - protein, 6 aa, Artificial Sequence
  Synthetic Construct
SCYRIL

SEQ ID NO: 1569 - protein, 6 aa, Artificial Sequence
  Synthetic Construct
SCYRTL

SEQ ID NO: 1570 - protein, 6 aa, Artificial Sequence
  Synthetic Construct
SDYCNL

SEQ ID NO: 1571 - protein, 6 aa, Artificial Sequence
  Synthetic Construct
SDYEDL

SEQ ID NO: 1572 - protein, 6 aa, Artificial Sequence
  Synthetic Construct
SDYENV

SEQ ID NO: 1573 - protein, 6 aa, Artificial Sequence
  Synthetic Construct
SDYESV

SEQ ID NO: 1574 - protein, 6 aa, Artificial Sequence
  Synthetic Construct
SDYFIV

SEQ ID NO: 1575 - protein, 6 aa, Artificial Sequence
  Synthetic Construct
SDYHTL

SEQ ID NO: 1576 - protein, 6 aa, Artificial Sequence
  Synthetic Construct
SDYLAI

SEQ ID NO: 1577 - protein, 6 aa, Artificial Sequence
  Synthetic Construct
SDYLDI

SEQ ID NO: 1578 - protein, 6 aa, Artificial Sequence
  Synthetic Construct
SDYLEL

SEQ ID NO: 1579 - protein, 6 aa, Artificial Sequence
  Synthetic Construct
SDYQDL

SEQ ID NO: 1580 - protein, 6 aa, Artificial Sequence
  Synthetic Construct
SDYQRL

SEQ ID NO: 1581 - protein, 6 aa, Artificial Sequence
  Synthetic Construct
SDYSVI

SEQ ID NO: 1582 - protein, 6 aa, Artificial Sequence
  Synthetic Construct
SDYTHL

SEQ ID NO: 1583 - protein, 6 aa, Artificial Sequence
  Synthetic Construct
SEYASV

SEQ ID NO: 1584 - protein, 6 aa, Artificial Sequence
  Synthetic Construct
SEYEEL

SEQ ID NO: 1585 - protein, 6 aa, Artificial Sequence
  Synthetic Construct
SEYFEL

SEQ ID NO: 1586 - protein, 6 aa, Artificial Sequence
  Synthetic Construct
SEYGEL

SEQ ID NO: 1587 - protein, 6 aa, Artificial Sequence
  Synthetic Construct
SEYITL

SEQ ID NO: 1588 - protein, 6 aa, Artificial Sequence
  Synthetic Construct
SEYKAL

SEQ ID NO: 1589 - protein, 6 aa, Artificial Sequence
  Synthetic Construct
SEYKEL

SEQ ID NO: 1590 - protein, 6 aa, Artificial Sequence
  Synthetic Construct
SEYKGI

SEQ ID NO: 1591 - protein, 6 aa, Artificial Sequence
  Synthetic Construct
SEYLAI

SEQ ID NO: 1592 - protein, 6 aa, Artificial Sequence
  Synthetic Construct
SEYLEI

SEQ ID NO: 1593 - protein, 6 aa, Artificial Sequence
  Synthetic Construct
SEYMVI

SEQ ID NO: 1594 - protein, 6 aa, Artificial Sequence
  Synthetic Construct
SEYQSI

SEQ ID NO: 1595 - protein, 6 aa, Artificial Sequence
  Synthetic Construct
SEYRPI

SEQ ID NO: 1596 - protein, 6 aa, Artificial Sequence
  Synthetic Construct
SEYSEI

SEQ ID NO: 1597 - protein, 6 aa, Artificial Sequence
  Synthetic Construct
SEYSSI

SEQ ID NO: 1598 - protein, 6 aa, Artificial Sequence
  Synthetic Construct
SEYTPI

SEQ ID NO: 1599 - protein, 6 aa, Artificial Sequence
  Synthetic Construct
SEYTYV

SEQ ID NO: 1600 - protein, 6 aa, Artificial Sequence
  Synthetic Construct
SFYAAL

SEQ ID NO: 1601 - protein, 6 aa, Artificial Sequence
  Synthetic Construct
SFYDSL

SEQ ID NO: 1602 - protein, 6 aa, Artificial Sequence
  Synthetic Construct
SFYKGL

SEQ ID NO: 1603 - protein, 6 aa, Artificial Sequence
  Synthetic Construct
SFYLYV

SEQ ID NO: 1604 - protein, 6 aa, Artificial Sequence
  Synthetic Construct
SFYNAV

SEQ ID NO: 1605 - protein, 6 aa, Artificial Sequence
  Synthetic Construct
SFYPSV

SEQ ID NO: 1606 - protein, 6 aa, Artificial Sequence
  Synthetic Construct
SFYQQI

SEQ ID NO: 1607 - protein, 6 aa, Artificial Sequence
  Synthetic Construct
SFYQQL

SEQ ID NO: 1608 - protein, 6 aa, Artificial Sequence
  Synthetic Construct
SFYSAL

SEQ ID NO: 1609 - protein, 6 aa, Artificial Sequence
  Synthetic Construct
SFYSDI

SEQ ID NO: 1610 - protein, 6 aa, Artificial Sequence
  Synthetic Construct
SFYSKL

SEQ ID NO: 1611 - protein, 6 aa, Artificial Sequence
  Synthetic Construct
SFYSRV

SEQ ID NO: 1612 - protein, 6 aa, Artificial Sequence
  Synthetic Construct
SFYWNV

SEQ ID NO: 1613 - protein, 6 aa, Artificial Sequence
  Synthetic Construct
SFYYLI

SEQ ID NO: 1614 - protein, 6 aa, Artificial Sequence
  Synthetic Construct
SGYAQL

SEQ ID NO: 1615 - protein, 6 aa, Artificial Sequence
  Synthetic Construct
SGYATL

SEQ ID NO: 1616 - protein, 6 aa, Artificial Sequence
  Synthetic Construct
SGYEKL

SEQ ID NO: 1617 - protein, 6 aa, Artificial Sequence
  Synthetic Construct
SGYQLV

SEQ ID NO: 1618 - protein, 6 aa, Artificial Sequence
  Synthetic Construct
SGYQRI

SEQ ID NO: 1619 - protein, 6 aa, Artificial Sequence
  Synthetic Construct
SGYRRL

SEQ ID NO: 1620 - protein, 6 aa, Artificial Sequence
  Synthetic Construct
SGYSHL

SEQ ID NO: 1621 - protein, 6 aa, Artificial Sequence
  Synthetic Construct
SGYSQL

SEQ ID NO: 1622 - protein, 6 aa, Artificial Sequence
  Synthetic Construct
SGYTLI

SEQ ID NO: 1623 - protein, 6 aa, Artificial Sequence
  Synthetic Construct
SGYTRI

SEQ ID NO: 1624 - protein, 6 aa, Artificial Sequence
  Synthetic Construct
SGYYRV

SEQ ID NO: 1625 - protein, 6 aa, Artificial Sequence
  Synthetic Construct
SHYADV

SEQ ID NO: 1626 - protein, 6 aa, Artificial Sequence
  Synthetic Construct
SHYFPL

SEQ ID NO: 1627 - protein, 6 aa, Artificial Sequence
  Synthetic Construct
SHYIDI

SEQ ID NO: 1628 - protein, 6 aa, Artificial Sequence
  Synthetic Construct
SHYKRL

SEQ ID NO: 1629 - protein, 6 aa, Artificial Sequence
  Synthetic Construct
SHYQVV

SEQ ID NO: 1630 - protein, 6 aa, Artificial Sequence
  Synthetic Construct
SIYAPL

SEQ ID NO: 1631 - protein, 6 aa, Artificial Sequence
  Synthetic Construct
SIYATL

SEQ ID NO: 1632 - protein, 6 aa, Artificial Sequence
  Synthetic Construct
SIYEEL

SEQ ID NO: 1633 - protein, 6 aa, Artificial Sequence
  Synthetic Construct
SIYEEV

SEQ ID NO: 1634 - protein, 6 aa, Artificial Sequence
  Synthetic Construct
SIYELL

SEQ ID NO: 1635 - protein, 6 aa, Artificial Sequence
  Synthetic Construct
SIYEVL

SEQ ID NO: 1636 - protein, 6 aa, Artificial Sequence
  Synthetic Construct
SIYGDL

SEQ ID NO: 1637 - protein, 6 aa, Artificial Sequence
  Synthetic Construct
SIYKKL

SEQ ID NO: 1638 - protein, 6 aa, Artificial Sequence
  Synthetic Construct
SIYLNI

SEQ ID NO: 1639 - protein, 6 aa, Artificial Sequence
  Synthetic Construct
SIYLVI

SEQ ID NO: 1640 - protein, 6 aa, Artificial Sequence
  Synthetic Construct
SIYRYI

SEQ ID NO: 1641 - protein, 6 aa, Artificial Sequence
  Synthetic Construct
SIYSWI

SEQ ID NO: 1642 - protein, 6 aa, Artificial Sequence
  Synthetic Construct
SKYKEI

SEQ ID NO: 1643 - protein, 6 aa, Artificial Sequence
  Synthetic Construct
SKYKIL

SEQ ID NO: 1644 - protein, 6 aa, Artificial Sequence
  Synthetic Construct
SKYKSL

SEQ ID NO: 1645 - protein, 6 aa, Artificial Sequence
  Synthetic Construct
SKYLAV

SEQ ID NO: 1646 - protein, 6 aa, Artificial Sequence
  Synthetic Construct
SKYLGV

SEQ ID NO: 1647 - protein, 6 aa, Artificial Sequence
  Synthetic Construct
SKYNIL

SEQ ID NO: 1648 - protein, 6 aa, Artificial Sequence
  Synthetic Construct
SKYQAV

SEQ ID NO: 1649 - protein, 6 aa, Artificial Sequence
  Synthetic Construct
SKYSDI

SEQ ID NO: 1650 - protein, 6 aa, Artificial Sequence
  Synthetic Construct
SKYSSL

SEQ ID NO: 1651 - protein, 6 aa, Artificial Sequence
  Synthetic Construct
SKYVGL

SEQ ID NO: 1652 - protein, 6 aa, Artificial Sequence
  Synthetic Construct
SKYVSL

SEQ ID NO: 1653 - protein, 6 aa, Artificial Sequence
  Synthetic Construct
SLYANI

SEQ ID NO: 1654 - protein, 6 aa, Artificial Sequence
  Synthetic Construct
SLYAQV

SEQ ID NO: 1655 - protein, 6 aa, Artificial Sequence
  Synthetic Construct
SLYAYI

SEQ ID NO: 1656 - protein, 6 aa, Artificial Sequence
  Synthetic Construct
SLYDDL

SEQ ID NO: 1657 - protein, 6 aa, Artificial Sequence
  Synthetic Construct
SLYDFL

SEQ ID NO: 1658 - protein, 6 aa, Artificial Sequence
  Synthetic Construct
SLYDNL

SEQ ID NO: 1659 - protein, 6 aa, Artificial Sequence
  Synthetic Construct
SLYDSI

SEQ ID NO: 1660 - protein, 6 aa, Artificial Sequence
  Synthetic Construct
SLYDYL

SEQ ID NO: 1661 - protein, 6 aa, Artificial Sequence
  Synthetic Construct
SLYEGL

SEQ ID NO: 1662 - protein, 6 aa, Artificial Sequence
  Synthetic Construct
SLYEHI

SEQ ID NO: 1663 - protein, 6 aa, Artificial Sequence
  Synthetic Construct
SLYELL

SEQ ID NO: 1664 - protein, 6 aa, Artificial Sequence
  Synthetic Construct
SLYHCL

SEQ ID NO: 1665 - protein, 6 aa, Artificial Sequence
  Synthetic Construct
SLYHKL

SEQ ID NO: 1666 - protein, 6 aa, Artificial Sequence
  Synthetic Construct
SLYIGI

SEQ ID NO: 1667 - protein, 6 aa, Artificial Sequence
  Synthetic Construct
SLYKKL

SEQ ID NO: 1668 - protein, 6 aa, Artificial Sequence
  Synthetic Construct
SLYKNL

SEQ ID NO: 1669 - protein, 6 aa, Artificial Sequence
  Synthetic Construct
SLYLAI

SEQ ID NO: 1670 - protein, 6 aa, Artificial Sequence
  Synthetic Construct
SLYLGI

SEQ ID NO: 1671 - protein, 6 aa, Artificial Sequence
  Synthetic Construct
SLYNAL

SEQ ID NO: 1672 - protein, 6 aa, Artificial Sequence
  Synthetic Construct
SLYNLL

SEQ ID NO: 1673 - protein, 6 aa, Artificial Sequence
  Synthetic Construct
SLYRNI

SEQ ID NO: 1674 - protein, 6 aa, Artificial Sequence
  Synthetic Construct
SLYSDV

SEQ ID NO: 1675 - protein, 6 aa, Artificial Sequence
  Synthetic Construct
SLYTCV

SEQ ID NO: 1676 - protein, 6 aa, Artificial Sequence
  Synthetic Construct
SLYTTL

SEQ ID NO: 1677 - protein, 6 aa, Artificial Sequence
  Synthetic Construct
SLYVAI

SEQ ID NO: 1678 - protein, 6 aa, Artificial Sequence
  Synthetic Construct
SLYVDV

SEQ ID NO: 1679 - protein, 6 aa, Artificial Sequence
  Synthetic Construct
SLYVSI

SEQ ID NO: 1680 - protein, 6 aa, Artificial Sequence
  Synthetic Construct
SLYYAL

SEQ ID NO: 1681 - protein, 6 aa, Artificial Sequence
  Synthetic Construct
SLYYNI

SEQ ID NO: 1682 - protein, 6 aa, Artificial Sequence
  Synthetic Construct
SLYYPI

SEQ ID NO: 1683 - protein, 6 aa, Artificial Sequence
  Synthetic Construct
SMYDGL

SEQ ID NO: 1684 - protein, 6 aa, Artificial Sequence
  Synthetic Construct
SMYEDI

SEQ ID NO: 1685 - protein, 6 aa, Artificial Sequence
  Synthetic Construct
SMYNEI

SEQ ID NO: 1686 - protein, 6 aa, Artificial Sequence
  Synthetic Construct
SMYQSV

SEQ ID NO: 1687 - protein, 6 aa, Artificial Sequence
  Synthetic Construct
SMYTWL

SEQ ID NO: 1688 - protein, 6 aa, Artificial Sequence
  Synthetic Construct
SMYVSI

SEQ ID NO: 1689 - protein, 6 aa, Artificial Sequence
  Synthetic Construct
SNYENL

SEQ ID NO: 1690 - protein, 6 aa, Artificial Sequence
  Synthetic Construct
SNYGSL

SEQ ID NO: 1691 - protein, 6 aa, Artificial Sequence
  Synthetic Construct
SNYGTI

SEQ ID NO: 1692 - protein, 6 aa, Artificial Sequence
  Synthetic Construct
SNYLVL

SEQ ID NO: 1693 - protein, 6 aa, Artificial Sequence
  Synthetic Construct
SNYQEI

SEQ ID NO: 1694 - protein, 6 aa, Artificial Sequence
  Synthetic Construct
SNYRLL

SEQ ID NO: 1695 - protein, 6 aa, Artificial Sequence
  Synthetic Construct
SNYRTL

SEQ ID NO: 1696 - protein, 6 aa, Artificial Sequence
  Synthetic Construct
SNYSDI

SEQ ID NO: 1697 - protein, 6 aa, Artificial Sequence
  Synthetic Construct
SNYSLL

SEQ ID NO: 1698 - protein, 6 aa, Artificial Sequence
  Synthetic Construct
SPYAEI

SEQ ID NO: 1699 - protein, 6 aa, Artificial Sequence
  Synthetic Construct
SPYATL

SEQ ID NO: 1700 - protein, 6 aa, Artificial Sequence
  Synthetic Construct
SPYEKV

SEQ ID NO: 1701 - protein, 6 aa, Artificial Sequence
  Synthetic Construct
SPYGDI

SEQ ID NO: 1702 - protein, 6 aa, Artificial Sequence
  Synthetic Construct
SPYGGL

SEQ ID NO: 1703 - protein, 6 aa, Artificial Sequence
  Synthetic Construct
SPYNTL

SEQ ID NO: 1704 - protein, 6 aa, Artificial Sequence
  Synthetic Construct
SPYPGI

SEQ ID NO: 1705 - protein, 6 aa, Artificial Sequence
  Synthetic Construct
SPYPGV

SEQ ID NO: 1706 - protein, 6 aa, Artificial Sequence
  Synthetic Construct
SPYQEL

SEQ ID NO: 1707 - protein, 6 aa, Artificial Sequence
  Synthetic Construct
SPYRSV

SEQ ID NO: 1708 - protein, 6 aa, Artificial Sequence
  Synthetic Construct
SPYSRL

SEQ ID NO: 1709 - protein, 6 aa, Artificial Sequence
  Synthetic Construct
SPYTDV

SEQ ID NO: 1710 - protein, 6 aa, Artificial Sequence
  Synthetic Construct
SPYTSV

SEQ ID NO: 1711 - protein, 6 aa, Artificial Sequence
  Synthetic Construct
SPYVVI

SEQ ID NO: 1712 - protein, 6 aa, Artificial Sequence
  Synthetic Construct
SQYCVL

SEQ ID NO: 1713 - protein, 6 aa, Artificial Sequence
  Synthetic Construct
SQYEAL

SEQ ID NO: 1714 - protein, 6 aa, Artificial Sequence
  Synthetic Construct
SQYKRL

SEQ ID NO: 1715 - protein, 6 aa, Artificial Sequence
  Synthetic Construct
SQYLAL

SEQ ID NO: 1716 - protein, 6 aa, Artificial Sequence
  Synthetic Construct
SQYLRL

SEQ ID NO: 1717 - protein, 6 aa, Artificial Sequence
  Synthetic Construct
SQYMHV

SEQ ID NO: 1718 - protein, 6 aa, Artificial Sequence
  Synthetic Construct
SQYSAV

SEQ ID NO: 1719 - protein, 6 aa, Artificial Sequence
  Synthetic Construct
SQYTSI

SEQ ID NO: 1720 - protein, 6 aa, Artificial Sequence
  Synthetic Construct
SQYWRL

SEQ ID NO: 1721 - protein, 6 aa, Artificial Sequence
  Synthetic Construct
SRYAEL

SEQ ID NO: 1722 - protein, 6 aa, Artificial Sequence
  Synthetic Construct
SRYATL

SEQ ID NO: 1723 - protein, 6 aa, Artificial Sequence
  Synthetic Construct
SRYESL

SEQ ID NO: 1724 - protein, 6 aa, Artificial Sequence
  Synthetic Construct
SRYGLL

SEQ ID NO: 1725 - protein, 6 aa, Artificial Sequence
  Synthetic Construct
SRYLSL

SEQ ID NO: 1726 - protein, 6 aa, Artificial Sequence
  Synthetic Construct
SRYMEL

SEQ ID NO: 1727 - protein, 6 aa, Artificial Sequence
  Synthetic Construct
SRYMRI

SEQ ID NO: 1728 - protein, 6 aa, Artificial Sequence
  Synthetic Construct
SRYPPV

SEQ ID NO: 1729 - protein, 6 aa, Artificial Sequence
  Synthetic Construct
SRYQAL

SEQ ID NO: 1730 - protein, 6 aa, Artificial Sequence
  Synthetic Construct
SRYQQL

SEQ ID NO: 1731 - protein, 6 aa, Artificial Sequence
  Synthetic Construct
SRYRFI

SEQ ID NO: 1732 - protein, 6 aa, Artificial Sequence
  Synthetic Construct
SRYRFV

SEQ ID NO: 1733 - protein, 6 aa, Artificial Sequence
  Synthetic Construct
SRYSAL

SEQ ID NO: 1734 - protein, 6 aa, Artificial Sequence
  Synthetic Construct
SRYSDL

SEQ ID NO: 1735 - protein, 6 aa, Artificial Sequence
  Synthetic Construct
SRYTGL

SEQ ID NO: 1736 - protein, 6 aa, Artificial Sequence
  Synthetic Construct
SRYVRL

SEQ ID NO: 1737 - protein, 6 aa, Artificial Sequence
  Synthetic Construct
SSYDEL

SEQ ID NO: 1738 - protein, 6 aa, Artificial Sequence
  Synthetic Construct
SSYEAL

SEQ ID NO: 1739 - protein, 6 aa, Artificial Sequence
  Synthetic Construct
SSYEIV

SEQ ID NO: 1740 - protein, 6 aa, Artificial Sequence
  Synthetic Construct
SSYEPL

SEQ ID NO: 1741 - protein, 6 aa, Artificial Sequence
  Synthetic Construct
SSYGRL

SEQ ID NO: 1742 - protein, 6 aa, Artificial Sequence
  Synthetic Construct
SSYGSI

SEQ ID NO: 1743 - protein, 6 aa, Artificial Sequence
  Synthetic Construct
SSYGSL

SEQ ID NO: 1744 - protein, 6 aa, Artificial Sequence
  Synthetic Construct
SSYHII

SEQ ID NO: 1745 - protein, 6 aa, Artificial Sequence
  Synthetic Construct
SSYHIL

SEQ ID NO: 1746 - protein, 6 aa, Artificial Sequence
  Synthetic Construct
SSYHKL

SEQ ID NO: 1747 - protein, 6 aa, Artificial Sequence
  Synthetic Construct
SSYHNI

SEQ ID NO: 1748 - protein, 6 aa, Artificial Sequence
  Synthetic Construct
SSYIKV

SEQ ID NO: 1749 - protein, 6 aa, Artificial Sequence
  Synthetic Construct
SSYNSV

SEQ ID NO: 1750 - protein, 6 aa, Artificial Sequence
  Synthetic Construct
SSYQEI

SEQ ID NO: 1751 - protein, 6 aa, Artificial Sequence
  Synthetic Construct
SSYRKV

SEQ ID NO: 1752 - protein, 6 aa, Artificial Sequence
  Synthetic Construct
SSYRRV

SEQ ID NO: 1753 - protein, 6 aa, Artificial Sequence
  Synthetic Construct
SSYSDI

SEQ ID NO: 1754 - protein, 6 aa, Artificial Sequence
  Synthetic Construct
SSYTPL

SEQ ID NO: 1755 - protein, 6 aa, Artificial Sequence
  Synthetic Construct
SSYTRL

SEQ ID NO: 1756 - protein, 6 aa, Artificial Sequence
  Synthetic Construct
SSYTSV

SEQ ID NO: 1757 - protein, 6 aa, Artificial Sequence
  Synthetic Construct
SSYTTI

SEQ ID NO: 1758 - protein, 6 aa, Artificial Sequence
  Synthetic Construct
SSYVKL

SEQ ID NO: 1759 - protein, 6 aa, Artificial Sequence
  Synthetic Construct
STYAEV

SEQ ID NO: 1760 - protein, 6 aa, Artificial Sequence
  Synthetic Construct
STYAGI

SEQ ID NO: 1761 - protein, 6 aa, Artificial Sequence
  Synthetic Construct
STYAHL

SEQ ID NO: 1762 - protein, 6 aa, Artificial Sequence
  Synthetic Construct
STYALV

SEQ ID NO: 1763 - protein, 6 aa, Artificial Sequence
  Synthetic Construct
STYAPI

SEQ ID NO: 1764 - protein, 6 aa, Artificial Sequence
  Synthetic Construct
STYDHV

SEQ ID NO: 1765 - protein, 6 aa, Artificial Sequence
  Synthetic Construct
STYDKV

SEQ ID NO: 1766 - protein, 6 aa, Artificial Sequence
  Synthetic Construct
STYDQV

SEQ ID NO: 1767 - protein, 6 aa, Artificial Sequence
  Synthetic Construct
STYDRI

SEQ ID NO: 1768 - protein, 6 aa, Artificial Sequence
  Synthetic Construct
STYEEL

SEQ ID NO: 1769 - protein, 6 aa, Artificial Sequence
  Synthetic Construct
STYEYL

SEQ ID NO: 1770 - protein, 6 aa, Artificial Sequence
  Synthetic Construct
STYILV

SEQ ID NO: 1771 - protein, 6 aa, Artificial Sequence
  Synthetic Construct
STYLPL

SEQ ID NO: 1772 - protein, 6 aa, Artificial Sequence
  Synthetic Construct
STYMAV

SEQ ID NO: 1773 - protein, 6 aa, Artificial Sequence
  Synthetic Construct
STYQTL

SEQ ID NO: 1774 - protein, 6 aa, Artificial Sequence
  Synthetic Construct
STYRKL

SEQ ID NO: 1775 - protein, 6 aa, Artificial Sequence
  Synthetic Construct
STYSQL

SEQ ID NO: 1776 - protein, 6 aa, Artificial Sequence
  Synthetic Construct
STYTSI

SEQ ID NO: 1777 - protein, 6 aa, Artificial Sequence
  Synthetic Construct
STYYQV

SEQ ID NO: 1778 - protein, 6 aa, Artificial Sequence
  Synthetic Construct
SVYATL

SEQ ID NO: 1779 - protein, 6 aa, Artificial Sequence
  Synthetic Construct
SVYCFL

SEQ ID NO: 1780 - protein, 6 aa, Artificial Sequence
  Synthetic Construct
SVYCNL

SEQ ID NO: 1781 - protein, 6 aa, Artificial Sequence
  Synthetic Construct
SVYDSV

SEQ ID NO: 1782 - protein, 6 aa, Artificial Sequence
  Synthetic Construct
SVYDTI

SEQ ID NO: 1783 - protein, 6 aa, Artificial Sequence
  Synthetic Construct
SVYEKV

SEQ ID NO: 1784 - protein, 6 aa, Artificial Sequence
  Synthetic Construct
SVYEML

SEQ ID NO: 1785 - protein, 6 aa, Artificial Sequence
  Synthetic Construct
SVYGSV

SEQ ID NO: 1786 - protein, 6 aa, Artificial Sequence
  Synthetic Construct
SVYPII

SEQ ID NO: 1787 - protein, 6 aa, Artificial Sequence
  Synthetic Construct
SVYQPI

SEQ ID NO: 1788 - protein, 6 aa, Artificial Sequence
  Synthetic Construct
SVYRKV

SEQ ID NO: 1789 - protein, 6 aa, Artificial Sequence
  Synthetic Construct
SVYSHL

SEQ ID NO: 1790 - protein, 6 aa, Artificial Sequence
  Synthetic Construct
SVYSRV

SEQ ID NO: 1791 - protein, 6 aa, Artificial Sequence
  Synthetic Construct
SVYTAL

SEQ ID NO: 1792 - protein, 6 aa, Artificial Sequence
  Synthetic Construct
SVYTEL

SEQ ID NO: 1793 - protein, 6 aa, Artificial Sequence
  Synthetic Construct
SVYWKV

SEQ ID NO: 1794 - protein, 6 aa, Artificial Sequence
  Synthetic Construct
SWYDSI

SEQ ID NO: 1795 - protein, 6 aa, Artificial Sequence
  Synthetic Construct
SWYFTV

SEQ ID NO: 1796 - protein, 6 aa, Artificial Sequence
  Synthetic Construct
SYYKAI

SEQ ID NO: 1797 - protein, 6 aa, Artificial Sequence
  Synthetic Construct
SYYLKL

SEQ ID NO: 1798 - protein, 6 aa, Artificial Sequence
  Synthetic Construct
SYYSFV

SEQ ID NO: 1799 - protein, 6 aa, Artificial Sequence
  Synthetic Construct
SYYVTI

SEQ ID NO: 1800 - protein, 6 aa, Artificial Sequence
  Synthetic Construct
VAYADL

SEQ ID NO: 1801 - protein, 6 aa, Artificial Sequence
  Synthetic Construct
VAYARI

SEQ ID NO: 1802 - protein, 6 aa, Artificial Sequence
  Synthetic Construct
VAYARV

SEQ ID NO: 1803 - protein, 6 aa, Artificial Sequence
  Synthetic Construct
VAYDQL

SEQ ID NO: 1804 - protein, 6 aa, Artificial Sequence
  Synthetic Construct
VAYGHV

SEQ ID NO: 1805 - protein, 6 aa, Artificial Sequence
  Synthetic Construct
VAYKQV

SEQ ID NO: 1806 - protein, 6 aa, Artificial Sequence
  Synthetic Construct
VAYKRL

SEQ ID NO: 1807 - protein, 6 aa, Artificial Sequence
  Synthetic Construct
VAYNLL

SEQ ID NO: 1808 - protein, 6 aa, Artificial Sequence
  Synthetic Construct
VAYQRV

SEQ ID NO: 1809 - protein, 6 aa, Artificial Sequence
  Synthetic Construct
VAYSGV

SEQ ID NO: 1810 - protein, 6 aa, Artificial Sequence
  Synthetic Construct
VAYSQV

SEQ ID NO: 1811 - protein, 6 aa, Artificial Sequence
  Synthetic Construct
VCYCIV

SEQ ID NO: 1812 - protein, 6 aa, Artificial Sequence
  Synthetic Construct
VCYGLV

SEQ ID NO: 1813 - protein, 6 aa, Artificial Sequence
  Synthetic Construct
VCYGRL

SEQ ID NO: 1814 - protein, 6 aa, Artificial Sequence
  Synthetic Construct
VCYIVV

SEQ ID NO: 1815 - protein, 6 aa, Artificial Sequence
  Synthetic Construct
VCYLLV

SEQ ID NO: 1816 - protein, 6 aa, Artificial Sequence
  Synthetic Construct
VDYDCI

SEQ ID NO: 1817 - protein, 6 aa, Artificial Sequence
  Synthetic Construct
VDYDFL

SEQ ID NO: 1818 - protein, 6 aa, Artificial Sequence
  Synthetic Construct
VDYFTI

SEQ ID NO: 1819 - protein, 6 aa, Artificial Sequence
  Synthetic Construct
VDYFVL

SEQ ID NO: 1820 - protein, 6 aa, Artificial Sequence
  Synthetic Construct
VDYGEL

SEQ ID NO: 1821 - protein, 6 aa, Artificial Sequence
  Synthetic Construct
VDYILV

SEQ ID NO: 1822 - protein, 6 aa, Artificial Sequence
  Synthetic Construct
VDYIQV

SEQ ID NO: 1823 - protein, 6 aa, Artificial Sequence
  Synthetic Construct
VDYKNI

SEQ ID NO: 1824 - protein, 6 aa, Artificial Sequence
  Synthetic Construct
VDYMSI

SEQ ID NO: 1825 - protein, 6 aa, Artificial Sequence
  Synthetic Construct
VDYNLV

SEQ ID NO: 1826 - protein, 6 aa, Artificial Sequence
  Synthetic Construct
VDYPDV

SEQ ID NO: 1827 - protein, 6 aa, Artificial Sequence
  Synthetic Construct
VDYSDL

SEQ ID NO: 1828 - protein, 6 aa, Artificial Sequence
  Synthetic Construct
VDYSSV

SEQ ID NO: 1829 - protein, 6 aa, Artificial Sequence
  Synthetic Construct
VDYTTL

SEQ ID NO: 1830 - protein, 6 aa, Artificial Sequence
  Synthetic Construct
VDYVDV

SEQ ID NO: 1831 - protein, 6 aa, Artificial Sequence
  Synthetic Construct
VDYVGV

SEQ ID NO: 1832 - protein, 6 aa, Artificial Sequence
  Synthetic Construct
VDYVIL

SEQ ID NO: 1833 - protein, 6 aa, Artificial Sequence
  Synthetic Construct
VDYVQV

SEQ ID NO: 1834 - protein, 6 aa, Artificial Sequence
  Synthetic Construct
VEYAPL

SEQ ID NO: 1835 - protein, 6 aa, Artificial Sequence
  Synthetic Construct
VEYDPL

SEQ ID NO: 1836 - protein, 6 aa, Artificial Sequence
  Synthetic Construct
VEYGTI

SEQ ID NO: 1837 - protein, 6 aa, Artificial Sequence
  Synthetic Construct
VEYHRL

SEQ ID NO: 1838 - protein, 6 aa, Artificial Sequence
  Synthetic Construct
VEYLEV

SEQ ID NO: 1839 - protein, 6 aa, Artificial Sequence
  Synthetic Construct
VEYQLL

SEQ ID NO: 1840 - protein, 6 aa, Artificial Sequence
  Synthetic Construct
VEYRPL

SEQ ID NO: 1841 - protein, 6 aa, Artificial Sequence
  Synthetic Construct
VEYSSI

SEQ ID NO: 1842 - protein, 6 aa, Artificial Sequence
  Synthetic Construct
VEYSTV

SEQ ID NO: 1843 - protein, 6 aa, Artificial Sequence
  Synthetic Construct
VFYAEI

SEQ ID NO: 1844 - protein, 6 aa, Artificial Sequence
  Synthetic Construct
VFYLAV

SEQ ID NO: 1845 - protein, 6 aa, Artificial Sequence
  Synthetic Construct
VFYRQV

SEQ ID NO: 1846 - protein, 6 aa, Artificial Sequence
  Synthetic Construct
VFYVGV

SEQ ID NO: 1847 - protein, 6 aa, Artificial Sequence
  Synthetic Construct
VFYYVI

SEQ ID NO: 1848 - protein, 6 aa, Artificial Sequence
  Synthetic Construct
VFYYVL

SEQ ID NO: 1849 - protein, 6 aa, Artificial Sequence
  Synthetic Construct
VGYETI

SEQ ID NO: 1850 - protein, 6 aa, Artificial Sequence
  Synthetic Construct
VHYALL

SEQ ID NO: 1851 - protein, 6 aa, Artificial Sequence
  Synthetic Construct
VHYARL

SEQ ID NO: 1852 - protein, 6 aa, Artificial Sequence
  Synthetic Construct
VHYETL

SEQ ID NO: 1853 - protein, 6 aa, Artificial Sequence
  Synthetic Construct
VHYGGV

SEQ ID NO: 1854 - protein, 6 aa, Artificial Sequence
  Synthetic Construct
VHYHSL

SEQ ID NO: 1855 - protein, 6 aa, Artificial Sequence
  Synthetic Construct
VHYIPV

SEQ ID NO: 1856 - protein, 6 aa, Artificial Sequence
  Synthetic Construct
VHYKEI

SEQ ID NO: 1857 - protein, 6 aa, Artificial Sequence
  Synthetic Construct
VHYLQV

SEQ ID NO: 1858 - protein, 6 aa, Artificial Sequence
  Synthetic Construct
VHYNSL

SEQ ID NO: 1859 - protein, 6 aa, Artificial Sequence
  Synthetic Construct
VHYQSV

SEQ ID NO: 1860 - protein, 6 aa, Artificial Sequence
  Synthetic Construct
VHYRSL

SEQ ID NO: 1861 - protein, 6 aa, Artificial Sequence
  Synthetic Construct
VIYAQL

SEQ ID NO: 1862 - protein, 6 aa, Artificial Sequence
  Synthetic Construct
VIYDRL

SEQ ID NO: 1863 - protein, 6 aa, Artificial Sequence
  Synthetic Construct
VIYENV

SEQ ID NO: 1864 - protein, 6 aa, Artificial Sequence
  Synthetic Construct
VIYEPL

SEQ ID NO: 1865 - protein, 6 aa, Artificial Sequence
  Synthetic Construct
VIYERL

SEQ ID NO: 1866 - protein, 6 aa, Artificial Sequence
  Synthetic Construct
VIYIDV

SEQ ID NO: 1867 - protein, 6 aa, Artificial Sequence
  Synthetic Construct
VIYKKI

SEQ ID NO: 1868 - protein, 6 aa, Artificial Sequence
  Synthetic Construct
VIYKRI

SEQ ID NO: 1869 - protein, 6 aa, Artificial Sequence
  Synthetic Construct
VIYPFL

SEQ ID NO: 1870 - protein, 6 aa, Artificial Sequence
  Synthetic Construct
VIYPNI

SEQ ID NO: 1871 - protein, 6 aa, Artificial Sequence
  Synthetic Construct
VIYSDL

SEQ ID NO: 1872 - protein, 6 aa, Artificial Sequence
  Synthetic Construct
VIYSML

SEQ ID NO: 1873 - protein, 6 aa, Artificial Sequence
  Synthetic Construct
VIYSSV

SEQ ID NO: 1874 - protein, 6 aa, Artificial Sequence
  Synthetic Construct
VIYSWI

SEQ ID NO: 1875 - protein, 6 aa, Artificial Sequence
  Synthetic Construct
VKYADI

SEQ ID NO: 1876 - protein, 6 aa, Artificial Sequence
  Synthetic Construct
VKYARL

SEQ ID NO: 1877 - protein, 6 aa, Artificial Sequence
  Synthetic Construct
VKYATL

SEQ ID NO: 1878 - protein, 6 aa, Artificial Sequence
  Synthetic Construct
VKYEGL

SEQ ID NO: 1879 - protein, 6 aa, Artificial Sequence
  Synthetic Construct
VKYGDL

SEQ ID NO: 1880 - protein, 6 aa, Artificial Sequence
  Synthetic Construct
VKYGSV

SEQ ID NO: 1881 - protein, 6 aa, Artificial Sequence
  Synthetic Construct
VKYLLV

SEQ ID NO: 1882 - protein, 6 aa, Artificial Sequence
  Synthetic Construct
VKYNPV

SEQ ID NO: 1883 - protein, 6 aa, Artificial Sequence
  Synthetic Construct
VKYPPI

SEQ ID NO: 1884 - protein, 6 aa, Artificial Sequence
  Synthetic Construct
VKYQRL

SEQ ID NO: 1885 - protein, 6 aa, Artificial Sequence
  Synthetic Construct
VKYQVI

SEQ ID NO: 1886 - protein, 6 aa, Artificial Sequence
  Synthetic Construct
VKYSEV

SEQ ID NO: 1887 - protein, 6 aa, Artificial Sequence
  Synthetic Construct
VKYSNV

SEQ ID NO: 1888 - protein, 6 aa, Artificial Sequence
  Synthetic Construct
VKYSRL

SEQ ID NO: 1889 - protein, 6 aa, Artificial Sequence
  Synthetic Construct
VKYSTL

SEQ ID NO: 1890 - protein, 6 aa, Artificial Sequence
  Synthetic Construct
VKYVDL

SEQ ID NO: 1891 - protein, 6 aa, Artificial Sequence
  Synthetic Construct
VLYADI

SEQ ID NO: 1892 - protein, 6 aa, Artificial Sequence
  Synthetic Construct
VLYAML

SEQ ID NO: 1893 - protein, 6 aa, Artificial Sequence
  Synthetic Construct
VLYASV

SEQ ID NO: 1894 - protein, 6 aa, Artificial Sequence
  Synthetic Construct
VLYCLL

SEQ ID NO: 1895 - protein, 6 aa, Artificial Sequence
  Synthetic Construct
VLYCLV

SEQ ID NO: 1896 - protein, 6 aa, Artificial Sequence
  Synthetic Construct
VLYCVL

SEQ ID NO: 1897 - protein, 6 aa, Artificial Sequence
  Synthetic Construct
VLYDCL

SEQ ID NO: 1898 - protein, 6 aa, Artificial Sequence
  Synthetic Construct
VLYFHI

SEQ ID NO: 1899 - protein, 6 aa, Artificial Sequence
  Synthetic Construct
VLYFTV

SEQ ID NO: 1900 - protein, 6 aa, Artificial Sequence
  Synthetic Construct
VLYGDL

SEQ ID NO: 1901 - protein, 6 aa, Artificial Sequence
  Synthetic Construct
VLYGQL

SEQ ID NO: 1902 - protein, 6 aa, Artificial Sequence
  Synthetic Construct
VLYPMV

SEQ ID NO: 1903 - protein, 6 aa, Artificial Sequence
  Synthetic Construct
VLYPRL

SEQ ID NO: 1904 - protein, 6 aa, Artificial Sequence
  Synthetic Construct
VLYPRV

SEQ ID NO: 1905 - protein, 6 aa, Artificial Sequence
  Synthetic Construct
VLYSEL

SEQ ID NO: 1906 - protein, 6 aa, Artificial Sequence
  Synthetic Construct
VLYSRV

SEQ ID NO: 1907 - protein, 6 aa, Artificial Sequence
  Synthetic Construct
VLYTAV

SEQ ID NO: 1908 - protein, 6 aa, Artificial Sequence
  Synthetic Construct
VLYTIL

SEQ ID NO: 1909 - protein, 6 aa, Artificial Sequence
  Synthetic Construct
VMYDAV

SEQ ID NO: 1910 - protein, 6 aa, Artificial Sequence
  Synthetic Construct
VNYESI

SEQ ID NO: 1911 - protein, 6 aa, Artificial Sequence
  Synthetic Construct
VNYSAL

SEQ ID NO: 1912 - protein, 6 aa, Artificial Sequence
  Synthetic Construct
VNYSKI

SEQ ID NO: 1913 - protein, 6 aa, Artificial Sequence
  Synthetic Construct
VNYSSI

SEQ ID NO: 1914 - protein, 6 aa, Artificial Sequence
  Synthetic Construct
VPYALL

SEQ ID NO: 1915 - protein, 6 aa, Artificial Sequence
  Synthetic Construct
VPYDTL

SEQ ID NO: 1916 - protein, 6 aa, Artificial Sequence
  Synthetic Construct
VPYEDV

SEQ ID NO: 1917 - protein, 6 aa, Artificial Sequence
  Synthetic Construct
VPYEEL

SEQ ID NO: 1918 - protein, 6 aa, Artificial Sequence
  Synthetic Construct
VPYKTI

SEQ ID NO: 1919 - protein, 6 aa, Artificial Sequence
  Synthetic Construct
VPYLRV

SEQ ID NO: 1920 - protein, 6 aa, Artificial Sequence
  Synthetic Construct
VPYNDL

SEQ ID NO: 1921 - protein, 6 aa, Artificial Sequence
  Synthetic Construct
VPYPAL

SEQ ID NO: 1922 - protein, 6 aa, Artificial Sequence
  Synthetic Construct
VPYQEL

SEQ ID NO: 1923 - protein, 6 aa, Artificial Sequence
  Synthetic Construct
VPYRLL

SEQ ID NO: 1924 - protein, 6 aa, Artificial Sequence
  Synthetic Construct
VPYSEL

SEQ ID NO: 1925 - protein, 6 aa, Artificial Sequence
  Synthetic Construct
VPYTLL

SEQ ID NO: 1926 - protein, 6 aa, Artificial Sequence
  Synthetic Construct
VPYTPL

SEQ ID NO: 1927 - protein, 6 aa, Artificial Sequence
  Synthetic Construct
VPYTTL

SEQ ID NO: 1928 - protein, 6 aa, Artificial Sequence
  Synthetic Construct
VPYVEL

SEQ ID NO: 1929 - protein, 6 aa, Artificial Sequence
  Synthetic Construct
VPYVMV

SEQ ID NO: 1930 - protein, 6 aa, Artificial Sequence
  Synthetic Construct
VPYVSL

SEQ ID NO: 1931 - protein, 6 aa, Artificial Sequence
  Synthetic Construct
VQYKAV

SEQ ID NO: 1932 - protein, 6 aa, Artificial Sequence
  Synthetic Construct
VQYKEI

SEQ ID NO: 1933 - protein, 6 aa, Artificial Sequence
  Synthetic Construct
VQYNIV

SEQ ID NO: 1934 - protein, 6 aa, Artificial Sequence
  Synthetic Construct
VQYRPV

SEQ ID NO: 1935 - protein, 6 aa, Artificial Sequence
  Synthetic Construct
VQYSQI

SEQ ID NO: 1936 - protein, 6 aa, Artificial Sequence
  Synthetic Construct
VQYSTV

SEQ ID NO: 1937 - protein, 6 aa, Artificial Sequence
  Synthetic Construct
VQYTEV

SEQ ID NO: 1938 - protein, 6 aa, Artificial Sequence
  Synthetic Construct
VQYYNI

SEQ ID NO: 1939 - protein, 6 aa, Artificial Sequence
  Synthetic Construct
VRYARL

SEQ ID NO: 1940 - protein, 6 aa, Artificial Sequence
  Synthetic Construct
VRYDNL

SEQ ID NO: 1941 - protein, 6 aa, Artificial Sequence
  Synthetic Construct
VRYGRI

SEQ ID NO: 1942 - protein, 6 aa, Artificial Sequence
  Synthetic Construct
VRYKKL

SEQ ID NO: 1943 - protein, 6 aa, Artificial Sequence
  Synthetic Construct
VRYKRV

SEQ ID NO: 1944 - protein, 6 aa, Artificial Sequence
  Synthetic Construct
VRYLDV

SEQ ID NO: 1945 - protein, 6 aa, Artificial Sequence
  Synthetic Construct
VRYRTI

SEQ ID NO: 1946 - protein, 6 aa, Artificial Sequence
  Synthetic Construct
VRYSDI

SEQ ID NO: 1947 - protein, 6 aa, Artificial Sequence
  Synthetic Construct
VRYTQL

SEQ ID NO: 1948 - protein, 6 aa, Artificial Sequence
  Synthetic Construct
VRYVCL

SEQ ID NO: 1949 - protein, 6 aa, Artificial Sequence
  Synthetic Construct
VSYAEL

SEQ ID NO: 1950 - protein, 6 aa, Artificial Sequence
  Synthetic Construct
VSYASV

SEQ ID NO: 1951 - protein, 6 aa, Artificial Sequence
  Synthetic Construct
VSYEPI

SEQ ID NO: 1952 - protein, 6 aa, Artificial Sequence
  Synthetic Construct
VSYGDI

SEQ ID NO: 1953 - protein, 6 aa, Artificial Sequence
  Synthetic Construct
VSYIGL

SEQ ID NO: 1954 - protein, 6 aa, Artificial Sequence
  Synthetic Construct
VSYILV

SEQ ID NO: 1955 - protein, 6 aa, Artificial Sequence
  Synthetic Construct
VSYMML

SEQ ID NO: 1956 - protein, 6 aa, Artificial Sequence
  Synthetic Construct
VSYNNI

SEQ ID NO: 1957 - protein, 6 aa, Artificial Sequence
  Synthetic Construct
VSYNNL

SEQ ID NO: 1958 - protein, 6 aa, Artificial Sequence
  Synthetic Construct
VSYQEI

SEQ ID NO: 1959 - protein, 6 aa, Artificial Sequence
  Synthetic Construct
VSYQPI

SEQ ID NO: 1960 - protein, 6 aa, Artificial Sequence
  Synthetic Construct
VSYSAV

SEQ ID NO: 1961 - protein, 6 aa, Artificial Sequence
  Synthetic Construct
VSYSFL

SEQ ID NO: 1962 - protein, 6 aa, Artificial Sequence
  Synthetic Construct
VSYSLV

SEQ ID NO: 1963 - protein, 6 aa, Artificial Sequence
  Synthetic Construct
VSYSPV

SEQ ID NO: 1964 - protein, 6 aa, Artificial Sequence
  Synthetic Construct
VSYTML

SEQ ID NO: 1965 - protein, 6 aa, Artificial Sequence
  Synthetic Construct
VSYTNL

SEQ ID NO: 1966 - protein, 6 aa, Artificial Sequence
  Synthetic Construct
VSYTPL

SEQ ID NO: 1967 - protein, 6 aa, Artificial Sequence
  Synthetic Construct
VSYVKI

SEQ ID NO: 1968 - protein, 6 aa, Artificial Sequence
  Synthetic Construct
VSYVLL

SEQ ID NO: 1969 - protein, 6 aa, Artificial Sequence
  Synthetic Construct
VTYADL

SEQ ID NO: 1970 - protein, 6 aa, Artificial Sequence
  Synthetic Construct
VTYAEL

SEQ ID NO: 1971 - protein, 6 aa, Artificial Sequence
  Synthetic Construct
VTYAEV

SEQ ID NO: 1972 - protein, 6 aa, Artificial Sequence
  Synthetic Construct
VTYAKV

SEQ ID NO: 1973 - protein, 6 aa, Artificial Sequence
  Synthetic Construct
VTYAPV

SEQ ID NO: 1974 - protein, 6 aa, Artificial Sequence
  Synthetic Construct
VTYAQL

SEQ ID NO: 1975 - protein, 6 aa, Artificial Sequence
  Synthetic Construct
VTYATL

SEQ ID NO: 1976 - protein, 6 aa, Artificial Sequence
  Synthetic Construct
VTYATV

SEQ ID NO: 1977 - protein, 6 aa, Artificial Sequence
  Synthetic Construct
VTYGNI

SEQ ID NO: 1978 - protein, 6 aa, Artificial Sequence
  Synthetic Construct
VTYITI

SEQ ID NO: 1979 - protein, 6 aa, Artificial Sequence
  Synthetic Construct
VTYQII

SEQ ID NO: 1980 - protein, 6 aa, Artificial Sequence
  Synthetic Construct
VTYQIL

SEQ ID NO: 1981 - protein, 6 aa, Artificial Sequence
  Synthetic Construct
VTYQLL

SEQ ID NO: 1982 - protein, 6 aa, Artificial Sequence
  Synthetic Construct
VTYSAL

SEQ ID NO: 1983 - protein, 6 aa, Artificial Sequence
  Synthetic Construct
VTYSTL

SEQ ID NO: 1984 - protein, 6 aa, Artificial Sequence
  Synthetic Construct
VTYTLL

SEQ ID NO: 1985 - protein, 6 aa, Artificial Sequence
  Synthetic Construct
VTYTQL

SEQ ID NO: 1986 - protein, 6 aa, Artificial Sequence
  Synthetic Construct
VTYVNL

SEQ ID NO: 1987 - protein, 6 aa, Artificial Sequence
  Synthetic Construct
VVYADI

SEQ ID NO: 1988 - protein, 6 aa, Artificial Sequence
  Synthetic Construct
VVYEDV

SEQ ID NO: 1989 - protein, 6 aa, Artificial Sequence
  Synthetic Construct
VVYFCL

SEQ ID NO: 1990 - protein, 6 aa, Artificial Sequence
  Synthetic Construct
VVYKTL

SEQ ID NO: 1991 - protein, 6 aa, Artificial Sequence
  Synthetic Construct
VVYQKL

SEQ ID NO: 1992 - protein, 6 aa, Artificial Sequence
  Synthetic Construct
VVYSEV

SEQ ID NO: 1993 - protein, 6 aa, Artificial Sequence
  Synthetic Construct
VVYSQV

SEQ ID NO: 1994 - protein, 6 aa, Artificial Sequence
  Synthetic Construct
VVYSVV

SEQ ID NO: 1995 - protein, 6 aa, Artificial Sequence
  Synthetic Construct
VVYTVL

SEQ ID NO: 1996 - protein, 6 aa, Artificial Sequence
  Synthetic Construct
VVYYRI

SEQ ID NO: 1997 - protein, 6 aa, Artificial Sequence
  Synthetic Construct
VYYHWL

SEQ ID NO: 1998 - protein, 6 aa, Artificial Sequence
  Synthetic Construct
VYYLPL

SEQ ID NO: 1999 - protein, 307 aa, Artificial Sequence
  Synthetic Construct
MMALPVTALLLPLALLLHAEVQLQQSGPELVKPGTSVRISCKTSGYTFTEYTIHWVKQSHGKSLEWIGNINPNNGGTTYNQKFEDKATLTVDKSSSTAYMELRSLTSEDSAVYYCAAGWNFDYWGQGTTVTVSSGGGGSGGGGSGGGGSDIVMTQSHKFMSTSVGDRVSIICKASQDVGTAVDWYQQKPGQSPKLLIYWASTRHTGVPDRFTGSGSGTDFTLTITNVQSEDLADYFCQQYNSYPLTFGAGTMLDLKRAAATERRAEVPTAHPSPSPRPAGQFQTLVVGVVGGLLGSLVLLVWVLAVI

SEQ ID NO: 2000 - protein, 97 aa, Artificial Sequence
  Synthetic Construct
CSRAARGTIGARRTGQPLKEDPSAVPVFSVDYGELDFQWREKTPEPPVPCVPEQTEYATIVFPSGMGTSSPARRGSADGPRSAQPLRPEDGHCSWPL

SEQ ID NO: 2001 - protein, 111 aa, Artificial Sequence
  Synthetic Construct
RRHQGKQNELSDTAGREINLVDAHLKSEQTEASTRQNSQVLLSETGIYDNDPDLCFRMQEGSEVYSNPCLEENKPGIVYASLNHSVIGPNSRLARNVKEAPTEYASICVRS

SEQ ID NO: 2002 - protein, 120 aa, Artificial Sequence
  Synthetic Construct
WRRKRKEKQSETSPKEFLTIYEDVKDLKTRRNHEQEQTFPGGGSTIYSMIQSQSSAPTSQEPAYTLYSLIQPSRKSGSRKRNHSPSFNSTIYEVIGKSQPKAQNPARLSRKELENFDVYS

SEQ ID NO: 2003 - protein, 138 aa, Artificial Sequence
  Synthetic Construct
CSRAARGTIGARRTGQPLKEDPSAVPVFSVDYGELDFQWREKTPEPPVPCVPEQTEYATIVFPSGMGTSSPARRGSADGPRSAQPLRPEDGHCSWPLAVSLSKMLKKRSPLTTGVYVKMPPTEPECEKQFQPYFIPIN

SEQ ID NO: 2004 - protein, 151 aa, Artificial Sequence
  Synthetic Construct
CSRAARGTIGARRTGQPLKEDPSAVPVFSVDYGELDFQWREKTPEPPVPCVPEQTEYATIVFPSGMGTSSPARRGSADGPRSAQPLRPEDGHCSWPLHLWRRQWRPRRFSALEQGIHPPQAQSKIEELEQEPEPEPEPEPEPEPEPEPEQL

SEQ ID NO: 2005 - protein, 194 aa, Artificial Sequence
  Synthetic Construct
CSRAARGTIGARRTGQPLKEDPSAVPVFSVDYGELDFQWREKTPEPPVPCVPEQTEYATIVFPSGMGTSSPARRGSADGPRSAQPLRPEDGHCSWPLCSRAARGTIGARRTGQPLKEDPSAVPVFSVDYGELDFQWREKTPEPPVPCVPEQTEYATIVFPSGMGTSSPARRGSADGPRSAQPLRPEDGHCSWPL

SEQ ID NO: 2006 - protein, 175 aa, Artificial Sequence
  Synthetic Construct
CSRAARGTIGARRTGQPLKEDPSAVPVFSVDYGELDFQWREKTPEPPVPCVPEQTEYATIVFPSGMGTSSPARRGSADGPRSAQPLRPEDGHCSWPLFKWYSHSKEKIQNLSLISLANLPPSGLANAVAEGIRSEENIYTIEENVYEVEEPNEYYCYVSSRQQPSQPLGCRFAMP

SEQ ID NO: 2007 - protein, 113 aa, Artificial Sequence
  Synthetic Construct
WRMMKYQQKAAGMSPEQVLQPLEGDLCYADLTLQLAGTSPQKATTKLSSAQVDQVEVEYVTMASLPKEDISYASLTLGAEDQEPTYCNMGHLSSHLPGRGPEEPTEYSTISRP

SEQ ID NO: 2008 - protein, 179 aa, Artificial Sequence
  Synthetic Construct
KRKGRCSVPAFCSSQAEAPADTPEPTAGHTLYSVLSQGYEKLDTPLRPARQQPTPTSDSSSDSNLTTEEDEDRPEVHKPISGRYEVFDQVTQEGAGHDPAPEGQADYDPVTPYVTEVESVVGENTMYAQVFNLQGKTPVSQKEESSATIYCSIRKPQVVPPPQQNDLEIPESPTYENFT

SEQ ID NO: 2009 - protein, 118 aa, Artificial Sequence
  Synthetic Construct
KCYFLRKAKAKQMPVEMSRPAVPLLNSNNEKMSDPNMEANSHYGHNDDVRNHAMKPINDNKEPLNSDVQYTEVQVSSAESHKDLGKKDTETVYSEVRKAVPDAVESRYSRTEGSLDGT

SEQ ID NO: 2010 - protein, 94 aa, Artificial Sequence
  Synthetic Construct
VRSCRKKSARPAAGVGDTGIEDANAVRGSASQGPLTEPWAEDSPPDQPPPASARSSVGEGELQYASLSFQMVKPWDSRGQEATDTEYSEIKIHR

SEQ ID NO: 2011 - protein, 110 aa, Artificial Sequence
  Synthetic Construct
RIRQKKAQGSTSSTRLHEPEKNAREITQDTNDITYADLNLPKGKKPAPQAAEPNNHTEYASIQTSPQPASEDTLTYADLDMVHLNRTPKQPAPKPEPSFSEYASVQVPRK

SEQ ID NO: 2012 - protein, 122 aa, Artificial Sequence
  Synthetic Construct
CSRAARGTIGARRTGQPLKEDPSAVPVFSVDYGELDFQWREKTPEPPVPCVPEQTEYATIDFQWREKTPEPPVPCVPEQTEYATIVFPSGMGTSSPARRGSADGPRSAQPLRPEDGHCSWPL

SEQ ID NO: 2013 - protein, 147 aa, Artificial Sequence
  Synthetic Construct
CSRAARGTIGARRTGQPLKEDPSAVPVFSVDYGELDFQWREKTPEPPVPCVPEQTEYATIDFQWREKTPEPPVPCVPEQTEYATIDFQWREKTPEPPVPCVPEQTEYATIVFPSGMGTSSPARRGSADGPRSAQPLRPEDGHCSWPL

SEQ ID NO: 2014 - protein, 97 aa, Artificial Sequence
  Synthetic Construct
CSRAARGTIGARRTGQPLKEDPSAVPVFSVDYGELDFQWREKTPEPPVPCVPEQTEYSEIVFPSGMGTSSPARRGSADGPRSAQPLRPEDGHCSWPL

SEQ ID NO: 2015 - protein, 97 aa, Artificial Sequence
  Synthetic Construct
CSRAARGTIGARRTGQPLKEDPSAVPVFSVDYGELDFQWREKTPEPPVPCVPEQTEYSEVVFPSGMGTSSPARRGSADGPRSAQPLRPEDGHCSWPL

SEQ ID NO: 2016 - protein, 97 aa, Artificial Sequence
  Synthetic Construct
CSRAARGTIGARRTGQPLKEDPSAVPVFSVDYGELDFQWREKTPEPPVPCVPEQTEYASIVFPSGMGTSSPARRGSADGPRSAQPLRPEDGHCSWPL

SEQ ID NO: 2017 - protein, 181 aa, Artificial Sequence
  Synthetic Construct
CSRAARGTIGARRTGQPLKEDPSAVPVFSVDYGELDFQWREKTPEPPVPCVPEQTEYATIVFPSGMGTSSPARRGSADGPRSAQPLRPEDGHCSWPLHRWCSNKKNAAVMDQESAGNRTANSEDSDEQDPQEVTYTQLNHCVFTQRKITRPSQRPKTPPTDIIVYAELPNAESRSKVVSCP

SEQ ID NO: 2018 - protein, 198 aa, Artificial Sequence
  Synthetic Construct
CSRAARGTIGARRTGQPLKEDPSAVPVFSVDYGELDFQWREKTPEPPVPCVPEQTEYATIVFPSGMGTSSPARRGSADGPRSAQPLRPEDGHCSWPLHRQNQIKQGPPRSKDEEQKPQQRPDLAVDVLERTADKATVNGLPEKDRETDTSALAAGSSQEVTYAQLDHWALTQRTARAVSPQSTKPMAESITYAAVARH

SEQ ID NO: 2019 - protein, 486 aa, Artificial Sequence
  Synthetic Construct
MALPVTALLLPLALLLHAARPDIQMTQTTSSLSASLGDRVTISCRASQDISKYLNWYQQKPDGTVKLLIYHTSRLHSGVPSRFSGSGSGTDYSLTISNLEQEDIATYFCQQGNTLPYTFGGGTKLEITGGGGSGGGGSGGGGSEVKLQESGPGLVAPSQSLSVTCTVSGVSLPDYGVSWIRQPPRKGLEWLGVIWGSETTYYNSALKSRLTIIKDNSKSQVFLKMNSLQTDDTAIYYCAKHYYYGGSYAMDYWGQGTSVTVSSTTTPAPRPPTPAPTIASQPLSLRPEACRPAAGGAVHTRGLDFACDIYIWAPLAGTCGVLLLSLVITLYCKRGRKKLLYIFKQPFMRPVQTTQEEDGCSCRFPEEEEGGCELRVKFSRSADAPAYKQGQNQLYNELNLGRREEYDVLDKRRGRDPEMGGKPRRKNPQEGLYNELQKDKMAEAYSEIGMKGERRRGKGHDGLYQGLSTATKDTYDALHMQALPPR

SEQ ID NO: 2020 - protein, 485 aa, Artificial Sequence
  Synthetic Construct
MALPVTALLLPLALLLHAEVKLQQSGAELVRPGSSVKISCKASGYAFSSYWMNWVKQRPGQGLEWIGQIYPGDGDTNYNGKFKGQATLTADKSSSTAYMQLSGLTSEDSAVYFCARKTISSVVDFYFDYWGQGTTVTVSSGGGGSGGGGSGGGGSDIELTQSPKFMSTSVGDRVSVTCKASQNVGTNVAWYQQKPGQSPKPLIYSATYRNSGVPDRFTGSGSGTDFTLTITNVQSKDLADYFCQQYNRYPYTSGGGTKLEIKRAAAIEVMYPPPYLDNEKSNGTIIHVKGKHLCPSPLFPGPSKPFWVLVVVGGVLACYSLLVTVAFIIFWVRSKRSRLLHSDYMNMTPRRPGPTRKHYQPYAPPRDFAAYRSRVKFSRSADAPAYQQGQNQLYNELNLGRREEYDVLDKRRGRDPEMGGKPRRKNPQEGLYNELQKDKMAEAYSEIGMKGERRRGKGHDGLYQGLSTATKDTYDALHMQALPPR

SEQ ID NO: 2021 - protein, 168 aa, Artificial Sequence
  Synthetic Construct
LRHRRQGKHWTSTQRKADFQHPAGAVGPEPTDRGLQWRSSPAADAQEENLYAAVKHTQPEDGVEMDTRSPHDEDPQAVTYAEVKHSRPRREMASPPSPLSGEFLDTKDRQAEEDRQMDTEAAASEAPQDVTYAQLHSLTLRREATEPPPSQEGPSPAVPSIYATLAIH

SEQ ID NO: 2022 - protein, 82 aa, Artificial Sequence
  Synthetic Construct
LTRKKKALRIHSVEGDLRRKSAGQEEWSPSAPSPPGSCVQAEAAPAGLCGEQRGEDCAELHDYFNVLSYRSLGNCSFFTETG

SEQ ID NO: 2023 - protein, 74 aa, Artificial Sequence
  Synthetic Construct
HFGKTGRASDQRDLTEHKPSVSNHTQDHSNDPPNKMNEVTYSTLNFEAQQPTQPTSASPSLTATEIIYSEVKKQ

SEQ ID NO: 2024 - protein, 434 aa, Artificial Sequence
  Synthetic Construct
KYKQKPKYQVRWKIIESYEGNSYTFIDPTQLPYNEKWEFPRNNLQFGKTLGAGAFGKVVEATAFGLGKEDAVLKVAVKMLKSTAHADEKEALMSELKIMSHLGQHENIVNLLGACTHGGPVLVITEYCCYGDLLNFLRRKAEAMLGPSLSPGQDPEGGVDYKNIHLEKKYVRRDSGFSSQGVDTYVEMRPVSTSSNDSFSEQDLDKEDGRPLELRDLLHFSSQVAQGMAFLASKNCIHRDVAARNVLLTNGHVAKIGDFGLARDIMNDSNYIVKGNARLPVKWMAPESIFDCVYTVQSDVWSYGILLWEIFSLGLNPYPGILVNSKFYKLVKDGYQMAQPAFAPKNIYSIMQACWALEPTHRPTFQQICSFLQEQAQEDRRERDYTNLPSSSRSGGSGSSSSELEEESSSEHLTCCEQGDIAQPLLQPNNYQFC

SEQ ID NO: 2025 - protein, 93 aa, Artificial Sequence
  Synthetic Construct
KKLVKKFRQKKQRQWIGPTGMNQNMSFHRNHTATVRSHAENPTASHVDNEYSQPPRNSHLSAYPALEGALHRSSMQPDNSSDSDYDLHGAQRL

SEQ ID NO: 2026 - protein, 45 aa, Artificial Sequence
  Synthetic Construct
RKWCQYQKEIMERPPPFKPPPPPIKYTCIQEPNESDLPYHEMETL

SEQ ID NO: 2027 - protein, 141 aa, Artificial Sequence
  Synthetic Construct
KLQRRWKRTQSQQGLQENSSGQSFFVRNKKVRRAPLSEGPHSLGCYNPMMEDGISYTTLRFPEMNIPRTGDAESSEMQRPPPDCDDTVTYSALHKRQVGDYENVIPDFPEDEGIHYSELIQFGVGERPQAQENVDYVILKH

SEQ ID NO: 2028 - protein, 26 aa, Artificial Sequence
  Synthetic Construct
RKPQVVPPPQQNDLEIPESPTYENFT

SEQ ID NO: 2029 - protein, 25 aa, Artificial Sequence
  Synthetic Construct
GKSQPKAQNPARLSRKELENFDVYS

It is claimed:

1. An inhibitory chimeric antigen receptor (N-CAR) comprising
an extracellular domain comprising an antigen binding domain,
a transmembrane domain
an intracellular domain
wherein the intracellular domain comprises an Immunoreceptor Tyrosine-based Switch Motif ITSM, wherein said ITSM is a sequence of amino acid TX₁YX₂X₃X₄,
wherein
X₁ is an amino acid
X₂ is an amino acid
X₃ is an amino acid and
X₄ is V or I.

2. The N-CAR according to claim 1, wherein the intracellular domain is not the intracellular domain of human PD-1, human CD244 or human BTLA.

3. The N-CAR according to claim 1, wherein the intracellular domain comprises the sequence
((L1-ITIM-L2)ⁿ-(L3-ITSM-L4)^{m})^{p}, wherein
n is 0, 1 or an integer greater than 1;
m is 1 or an integer greater than 1;
p is 1 or an integer greater than 1;
L1 is absent or comprises one or more sequences selected from the group consisting of:
(a) a naturally occurring N-terminal flanking region of ITIM only intracellular domains selected from the sequences shown in Table 3 or a fragment thereof;
(b) a naturally occurring N-terminal flanking region of ITIM.*ITSM intracellular selected from the sequences shown in Table 1 or a fragment thereof;
(c) a naturally occurring intracellular domain from a known inhibitory receptor selected from the sequences shown in Table 2 or a fragment thereof, wherein said intracellular domain is N-terminally flanking to a sequence in (b) above, or a fragment thereof; and
(d) a non-naturally occurring sequence comprising between 1 and 500 amino acids;
each of L2 and L3 is absent or comprises one or more sequences selected from the group consisting of:
(e) a naturally occurring C-terminal flanking region of ITIM only intracellular domains selected from the sequences shown in Table 4 or a fragment thereof;
(f) a naturally occurring N-terminal flanking region of ITSM only intracellular domains selected from the sequences shown in Table 6, or a fragment thereof;
(g) a naturally occurring intracellular domain between ITIM and ITSM from proteins that have ITIM.*ITSM motif selected from the sequences shown in Table 5, or a fragment thereof;
(h) a naturally occurring intracellular domain from a known inhibitory receptor selected from the sequences shown in Table 2 or a fragment thereof wherein said intracellular domain is N-terminally flanking to a sequence in (f) or (g) above, or a fragment thereof; and
(i) a non-naturally occurring sequence comprising between 1 and 500 amino acids; and
L4 is absent or comprises one or more sequences selected from the group consisting of:
(j) a naturally occurring C-terminal flanking region of ITIM.*ITSM intracellular domains selected from the sequences shown in Table 7, or a fragment thereof;
(k) a naturally occurring C-terminal flanking region of ITSM only intracellular domains selected from the sequences shown in Table 8, or a fragment thereof;
(l) a naturally occurring intracellular domain from a known inhibitory receptor selected from the sequences shown in Table 2 or a fragment thereof wherein said intracellular domain is C-terminally flanking to a sequence in (j) or (k) above, or a fragment thereof; and,
(m) a non-naturally occurring sequence comprising between 1 and 500 amino acids and,
the ITIM is the sequence X₅X₆YX₇X₁₈X₉, wherein
X₅ is S, V, I or L,
X₆ is an amino acid,
X₇ is an amino acid,
X₈ is an amino acid, and,
X₉ is V, I or L, and
the ITSM is the sequence TX₁₁YX₂X₃X₄, wherein
X₁ is an amino acid,
X₂ is an amino acid,
X₃ is an amino acid, and,
X₄ is V or I,
or a variant thereof.

4. The N-CAR according to claim 3, wherein the intracellular domain comprises the following sequence:
((L1-ITIM-L2)ⁿ-(L3-ITSM-L4)^{m})^{p}, wherein
n is 0;
m is 1;
p is 1;
L3 comprises one sequence selected from
(f) a naturally occurring N-terminal flanking region of an ITSM only intracellular domain selected from the sequences shown in Table 6 below or a fragment thereof; or,
(i) a non-naturally occurring sequence comprising between 1 and 500 amino acids; and
L4 comprises one or more, preferably one or two, sequences selected from the group consisting of:
(k) a naturally occurring C-terminal flanking region of an ITSM only intracellular domain selected from the sequences shown in Table 8 below or a fragment thereof;
(l) a naturally occurring intracellular domain from a known inhibitory receptor selected from the sequences shown in table 2 or a fragment thereof wherein said intracellular domain is C-terminally flanking to a sequence in (k) above; and
(m) a non-naturally occurring sequence comprising between 1 and 500 amino acids.

5. The N-CAR according to claim 4, wherein L3 is selected from
CSRAARGTIGARRTGQPLKEDPSAVPVFSVDYGELDFQWREKTPEPPVPC
VPEQ
RIRQKKAQGSTSSTRLHEPEKNAREITQDTNDITYADLNLPKGKKPAPQA
AEPNNH
KCYFLRKAKAKQMPVEMSRPAVPLLNSNNEKMSDPNMEANSHYGHNDDVR
NHAMKPINDNKEPLNSDVQYTEVQVSSAESHKDLGKKDTE
RRHQGKQNELSDTAGREINLVDAHLKSEQTEASTRQNSQVLLSETGIYDN
DPDLCFRMQEGSEVYSNPCLEENKPGIVYASLNHSVIGPNSRLARNVKEA
P
WRMMKYQQKAAGMSPEQVLQPLEGDLCYADLTLQLAGTSPQKATTKLSSA
QVDQVEVEYVTMASLPKEDISYASLTLGAEDQEPTYCNMGHLSSHLPGRG
PEEP
WRRKRKEKQSETSPKEFLTIYEDVKDLKTRRNHEQEQTFPGGGSTIYSMI
QSQSSAPTSQEPAYTLYSLIQPSRKSGSRKRNHSPSFNS
VRSCRKKSARPAAGVGDTGIEDANAVRGSASQGPLTEPWAEDSPPDQPPP
ASARSSVGEGELQYASLSFQMVKPWDSRGQEATD
KRKGRCSVPAFCSSQAEAPADTPEPTAGHTLYSVLSQGYEKLDTPLRPAR
QQPTPTSDSSSDSNLTTEEDEDRPEVHKPISGRYEVFDQVTQEGAGHDPA
PEGQADYDPVTPYVTEVESVVGENTMYAQVFNLQGKTPVSQKEESSA
and L4 comprises one sequence selected from the group consisting of (k)
SRP
KIHR
CVRS
RKAVPDAVESRYSRTEGSLDGT
RKPQVVPPPQQNDLEIPESPTYENFT
GKSQPKAQNPARLSRKELENFDVYS
VFPSGMGTSSPARRGSADGPRSAQPLRPEDGHCSWPL
QTSPQPASEDTLTYADLDMVHLNRTPKQPAPKPEPSFSEYASVQVPRK
and optionally
(l) a naturally occurring intracellular domain from a known inhibitory receptor selected from the sequences shown in table 2 or a fragment thereof wherein said intracellular domain is C-terminally flanking to a sequence in (k) above.

6. The N-CAR according to claim 4, wherein L3 is selected from
CSRAARGTIGARRTGQPLKEDPSAVPVFSVDYGELDFQWREKTPEPPVPC
VPEQ
and L4 comprises (k)
VFPSGMGTSSPARRGSADGPRSAQPLRPEDGHCSWPL
and
(l) a naturally occurring intracellular domain from a known inhibitory receptor selected from the sequences shown in table 2 or a fragment thereof wherein said intracellular domain is C-terminally flanking to a sequence in (k) above.

7. The N-CAR according to claim 4, wherein L3 is
WRMMKYQQKAAGMSPEQVLQPLEGDLCYADLTLQLAGTSPQKATTKLSSA
QVDQVEVEYVTMASLPKEDISYASLTLGAEDQEPTYCNMGHLSSHLPGRG
PEEP
and L4 comprises one sequence selected from
(k)
SRP
and optionally
(l) a naturally occurring intracellular domain from a known inhibitory receptor selected from the sequences shown in table 2 or a fragment thereof wherein said intracellular domain is C-terminally flanking to a sequence in (k) above.

8. The N-CAR according to claim 4, wherein the intracellular domain comprises the following sequence:
((Li -ITIM-L2)ⁿ-(L3-ITSM-L4)^{m})^{p}, wherein
n is 0;
m is 1;
p is 1 or 2;
L3 comprises one sequence selected from
(i) a non-naturally occurring sequence comprising between 1 and 500 amino acids; and
L4 comprises one sequence selected from the group consisting of:
(m) a non-naturally occurring sequence comprising between 1 and 500 amino acids.

9. The N-CAR according to claim 1, wherein the ITSM, or at least one of the ITSMs when several ITSMs are present in the intracellular domain, is selected from
TAYELV, TAYGLI, TAYNAV, TCYGLV, TCYPDI, TDYASI,
TDYDLV, TDYLSI, TDYQQV, TDYYRV, TEYASI, TEYATI,
TEYDTI, TEYPLV, TEYSEI, TEYSEV, TEYSTI, TEYTKV,
TFYHVV, TFYLLI, TFYNKI, TFYPDI, TGYEDV, TGYLSI,
THYKEI, TIYAQV, TIYAVV, TIYCSI, TIYEDV, TIYERI,
TIYEVI, TIYHVI, TIYIGV, TIYLKV, TIYSMI, TIYSTI,
TIYTYI, TKYFHI, TKYMEI, TKYQSV, TKYSNI, TKYSTV,
TLYASV, TLYAVV, TLYFWV, TLYHLV, TLYPMV, TLYPPI,
TLYRDI, TLYRDV, TLYSKI, TLYSLI, TLYSPV, TMYAQV,
TMYCQV, TNYKAV, TNYNLV, TPYAGI, TPYPGV, TPYVDI,
TQYGRV, TQYNQV, TRYAYV, TRYGEV, TRYHSV, TRYKTI,
TRYLAI, TRYMAI, TRYQKI, TRYQQI, TRYSNI, TRYSPI,
TSYGTV, TSYMEV, TSYQGV, TSYTTI, TTYRSI, TTYSDV,
TTYVTI, TVYAQI, TVYASV, TVYEVI, TVYGDV, TVYKGI,
TVYQRV, TVYSEV, TVYSTV, TYYHSI, TYYLQI, or TYYYSV.

10. The N-CAR according to claim 1, wherein the ITSM, or at least one of the ITSMs when several ITSMs are present in the intracellular domain is selected from TEYASI, TEYSEI. TEYSTI or TVYSEV.

11. The N-CAR according to claim 1 wherein the antigen binding domain is a single chain variable fragment (scFv).

12. The N-CAR according to claim 1, wherein the intracellular domain is selected from SEQ ID No 2000, SEQ ID No 2001, SEQ ID No 2002, SEQ ID No 2003, SEQ ID No 2004, SEQ ID No 2005, SEQ ID No 2006, SEQ ID No 2007, SEQ ID No 2008, SEQ ID No 2009, SEQ ID No 2010, SEQ ID No 2011, SEQ ID No 2012, SEQ ID No 2013, SEQ ID No 2014, SEQ ID No 2015, SEQ ID No 2016 and SEQ ID No 2017 or a variant thereof.

13. The N-CAR according to claim 1 wherein the antigen binding domain binds to ITGAX, CD1 E, CD34, CD1C, CD123 or CD141, ZP2, GABRA6, CRTAM, GRM4, MDGA1, ZP2, GABRA6, CRTAM, GRM4, MDGA1, SFTPC, ROS1, SLC6A4, AGTR2, LRRC26, HTR3A, TMEM211, MRGPRX3, MEP1B, TMIGD1, CEACAM20, ALPI, TMPRSS11B, CYP17A1, ATP4B, GP2, MUC21, CLCA4 or SLC27A6.

14. The N-CAR according to claim 1, wherein the transmembrane domain comprises the transmembrane region(s) of the alpha, beta or zeta chain of the T-cell receptor, PD-1, 4-1BB, OX40, ICOS, CTLA-4, LAG3, 2B4, BTLA4, TIM-3, TIGIT, SIRPA, CD28, CD3 epsilon, CD45, CD4, CDS, CD8, CD9, CD16, CD22, CD33, CD37, CD64, CD80, CD86, CD134, CD137 or CD154.

15. The N-CAR according to claim 1, wherein the transmembrane domain comprises the transmembrane region of PD-1 or CD8 alpha.

16. The N-CAR according to claim 1, wherein the transmembrane domain is attached to the extracellular domain of the N-CAR via a hinge.

17. The N-CAR according to claim 16, wherein the hinge is an IgG4 hinge, a CD8 alpha hinge or a PD-1 hinge.

18. An isolated immune cell comprising a P-CAR comprising,
an extracellular domain comprising an antigen binding domain,
a transmembrane domain, and,
an intracellular domain
and an N-CAR according to claim 1.

19. The immune cell according to claim 18, wherein:
the antigen to which the antigen binding domain of the P-CAR binds is CD33 and the antigen to which the antigen binding domain of the N-CAR binds is ITGAX, CD1E, CD34, CD1C, CD123, or CD141, or,
the antigen to which the antigen binding domain of the P-CAR binds is FLT3 and the antigen to which the antigen binding domain of the N-CAR binds is ZP2, GABRA6, CRTAM, GRM4 or MDGA1, or,
the antigen to which the antigen binding domain of the P-CAR binds is MSLN and the antigen to which the antigen binding domain of the N-CAR binds is SFTPC, ROS1, SLC6A4 or AGTR2, or,
the antigen to which the antigen binding domain of the P-CAR binds is MUC16 and the antigen to which the antigen binding domain of the N-CAR binds is LRRC26, HTR3A, TMEM211 or MRGPRX3, or,
the antigen to which the antigen binding domain of the P-CAR binds is MUC17 and the antigen to which the antigen binding domain of the N-CAR binds is MEP1B, TMIGD1, CEACAM20 or ALPI, or,
the antigen to which the antigen binding domain of the P-CAR binds is present in tumor cells of pancreatic ductal adenocarcinoma and the antigen to which the antigen binding domain of the N-CAR binds is TMPRSS11B, CYP17A1 or ATP4B,
the antigen to which the antigen binding domain of the P-CAR binds is present in tumor cells of kidney clear cell carcinoma and the antigen to which the antigen binding domain of the N-CAR binds is GP2, MUC21, CLCA4 and SLC27A6.

20. The immune cell according to claim 18, wherein the immune cell is a human T-cell.

21. The immune cell according to claim 18 for its use for the treatment of cancer.

22. A method of engineering an immune cell according to claim 18 comprising: (a) Providing an immune cell; (b) expressing the N-CAR and the P-CAR at the surface of said cells.

23. A method for treating a patient in need thereof comprising: a) providing an immune cell according to claim 18, and; b) administrating said T-cells to said patient.

24. A polynucleotide comprising a nucleic acid sequence encoding an N-CAR according claim 1.

25. A vector comprising a polynucleotide according to claim 24.
